(19) United States
(12) Patent Application Publication
(10) Pub. No.: US 2023/0174993 A1
(43) Pub. Date: Jun. 8, 2023

(54) BIOSYNTHESIS OF MOGROSIDES

(71) Applicant: Ginkgo Bioworks, Inc., Boston, MA (US)

(72) Inventors: Jeffrey Ian Boucher, Allston, MA (US); Justin Michael Gardin, Watertown, MA (US); Scott Marr, Boston, MA (US); Matthew McMahon, Melrose, MA (US); Krishnaben S. Patel, Melrose, MA (US); Jie Zhu, Watertown, MA (US)

(73) Assignee: Ginkgo Bioworks, Inc., Boston, MA (US)

(21) Appl. No.: 17/924,659

(22) PCT Filed: May 13, 2021
(86) PCT No.: PCT/US2021/032251

§ 371 Date: Nov. 10, 2022

Related U.S. Application Data
(60) Provisional application No. 63/024,392, filed on May 13, 2020.

(51) Int. Cl. C12N 15/52; C12N 15/81; C12P 19/56; C12P 33/02

(52) U.S. Cl. CPC C12N 15/52; C12N 15/81; C12P 19/56; C12P 33/02; C12Y 114/15004; C12Y 303/0201; C12Y 303/02009; C12Y 504/99033

(57) ABSTRACT

Described in this application are UDP-glycosyltransferases (UGT) enzymes, host cells expressing the UGTs, and methods of producing mogrol precursors, mogrol, and/or mogrosides using such host cells.

### CROSS REFERENCE TO RELATED APPLICATIONS

[0001] This application claims the benefit under 35 U.S.C. § 119(e) of U.S. Provisional Application No. 63/024,392, filed May 13, 2020, entitled “BIOSYNTHESIS OF MOGROSIDES,” the entire disclosure of which is hereby incorporated by reference in its entirety.

### REFERENCE TO A SEQUENCE LISTING SUBMITTED AS A TEXT FILE VIA EFS-WEB

[0002] The instant application contains a Sequence Listing which has been submitted in ASCII format via EFS-Web and is hereby incorporated by reference in its entirety. The ASCII file, created on May 13, 2021, is named G091970061WO00-SEQ-FL.txt and is 888,111 bytes in size.

### FIELD OF THE INVENTION

[0003] The present disclosure relates to the production of mogrol precursors, mogrol and mogrosides in recombinant cells.

### BACKGROUND

[0004] Mogrosides are glycosides of cucurbitane derivatives. Highly sought after as sweeteners and sugar alternatives, mogrosides are naturally synthesized in the fruits of plants, including Siraitia grosvenorii ( S. grosvenorii). Although anti-cancer, anti-oxidative, and anti-inflammatory properties have been ascribed to mogrosides, characterization of the exact enzymes involved in mogroside biosynthesis is limited. Furthermore, mogroside extraction from fruit is labor-intensive and the structural complexity of mogrosides often hinders de novo chemical synthesis.

### SUMMARY

[0005] Aspects of the present disclosure provide host cells that comprise a heterologous polynucleotide encoding a UDP-glycosyltransferase (UGT). In some embodiments, the UGT comprises a sequence that is at least 90% identical to any one of SEQ ID NOs: 76, 101, 89, 71, 73, 97, 88, 85, 95, 96, 86, 92, 69, 66, 78, 75, 98, 90, 67, 91, 93, 65, 99, 68, 70, 72, 81, 83, 84, 94 and 100, wherein the UGT is capable of catalyzing conversion of mogrol to MIA1.

[0006] In some embodiments, the UGT comprises a sequence that is at least 90% identical to any one of SEQ ID NOs: 76, 101, 89, 71, 73, 97, 88, 85, 95, 96, 86, 92, 69, 66, 78, 75, 98, 90, 67, 91, 93, 65, 99, 68, 70, 72, 81, 83, and 84. In some embodiments, the UGT comprises a sequence that is at least 90% identical to SEQ ID NO: 76. In some embodiments, the UGT comprises a sequence that is at least 90% identical to SEQ ID NO: 66. In some embodiments, the UGT comprises SEQ ID NO: 88.

[0007] In some embodiments, the UGT comprises the sequence of any one of SEQ ID NOs: 76, 101, 89, 71, 73, 97, 88, 85, 95, 96, 86, 92, 69, 66, 78, 75, 98, 90, 67, 91, 93, 65, 99, 68, 70, 72, 81, 83, 84, 94, and 100. In some embodiments, the UGT comprises the sequence of any one of SEQ ID NOs: 76, 101, 89, 71, 73, 97, 88, 85, 95, 96, 86, 92, 69, 66, 78, 75, 98, 90, 67, 91, 93, 65, 99, 68, 70, 72, 81, 83, and 84. In some embodiments, the UGT comprises SEQ ID NO: 76.

[0008] Further aspects of the present disclosure provide host cells that comprise a heterologous polynucleotide encoding a UDP-glycosyltransferase (UGT), wherein the UGT comprises a sequence that is at least 90% identical to any one of SEQ ID NOs: 103, 74, 79, 102, 62, and 87 and wherein the UGT is capable of catalyzing conversion of mogrol to MIE1.

[0009] In some embodiments, the UGT comprises the sequence of any one of SEQ ID NOs: 103, 74, 79, 102, 62, and 87.

[0010] Further aspects of the present disclosure provide host cells that comprise a heterologous polynucleotide encoding a UDP-glycosyltransferase (UGT), wherein the UGT comprises a sequence that is at least 90% identical to any one of SEQ ID NOs: 63, 77, 84, and 94, and wherein the UGT is capable of catalyzing conversion of mogrol to MIIE1.

[0011] In some embodiments, the UGT comprises the sequence of any one of SEQ ID NOs: 63, 77, 84, and 94.

[0012] In some embodiments, the host cell further comprises one or more heterologous polynucleotides encoding one or more of: a cucurbitadienol synthase (CDS) enzyme, a C11 hydroxylase, a cytochrome P450 reductase, an epoxide hydrolase (EPH), and squalene epoxidase (SQE).

[0013] In some embodiments, the CDS enzyme comprises a sequence that is at least 90% identical to any one of SEQ ID NOs: 226, SEQ ID NO: 235, and SEQ ID NO: 232.

[0014] In some embodiments, the C11 hydroxylase comprises the sequence of any one of SEQ ID NOs: 280-281 and 305.

[0015] In some embodiments, the cytochrome P450 reductase comprises the sequence of any one of SEQ ID NOs: 282-283 and 306-307 or a sequence that has at least 90% identity to any one of SEQ ID NOs: 282-283 and 306-307.

[0016] In some embodiments, the EPH comprises the sequence of any one of SEQ ID NO: 284-292 and 309-310 or a sequence that has at least 90% identity to any one of SEQ ID NO: 284-292 and 309-310.

[0017] In some embodiments, the SQE comprises the sequence of any one of SEQ ID NOs: 293-295 and 312 or a sequence that has at least 90% identity to any one of SEQ ID NOs: 293-295 and 312.

[0018] In some embodiments, the host cell further comprises a secondary UGT. In some embodiments, the secondary UGT comprises a sequence that is at least 90% identical to any one of SEQ ID NOs: 104-106, 108-114, and 121. In some embodiments, the secondary UGT comprises the sequence of any one of SEQ ID NOs: 104-106 and 108-114.

[0019] In some embodiments, the host cell is a yeast cell, a plant cell, or a bacterial cell. In some embodiments, the host cell is a yeast cell. In some embodiments, the yeast cell is a Saccharomyces cerevisiae cell. In some embodiments, the yeast cell is a Yarrowia cell.

[0020] In some embodiments, the host cell is a bacterial cell. In some embodiments, the bacterial cell is an E. coli cell.

[0021] Further aspects of the present disclosure provide methods of producing a mogroside. In some embodiments, the methods comprise culturing any of the host cells disclosed herein with at least one mogroside precursor.

[0022] In some embodiments, the mogroside precursor is selected from mogrol, MIE1, MIA1, MIIA, MIIA1, MIIE, MIII, MIIIA1, and MIIIE.

[0023] In some embodiments, the mogroside that is produced is selected from MIA1, MIIA1, MIIE1, MIE1, MIII, MIIIA1, MIIIE, siamenoside I, and MV.

[0024] Further aspects of the present disclosure provide host cells that comprise a heterologous polynucleotide encoding a UDP-glycosyltransferase (UGT), wherein the UGT comprises a sequence that is at least 90% identical to any one of SEQ ID NOs: 104-106 and 108-114, and wherein the UGT is capable of producing one or more mogrosides from a mogroside precursor.

[0025] In some embodiments, the UGT comprises the sequence of any one of SEQ ID NOs: 104-106 and 108-114.

[0026] In some embodiments, the mogroside precursor is selected from mogrol, MIE1, MIA1, MIIA, MIIA1, MIIE, MIII, MIIIA1, and MIIIE.

[0027] In some embodiments, the mogroside that is produced is selected from MIA1, MIIA1, MIIIA1, MIIE1, MIII, siamenoside I, and MIIIE.

[0028] In some embodiments, the host cell further comprises one or more heterologous polynucleotides encoding one or more of: a cucurbitadienol synthase (CDS) enzyme, a C11 hydroxylase, a cytochrome P450 reductase, an epoxide hydrolase (EPH), and squalene epoxidase (SQE).

[0029] In some embodiments, the CDS enzyme comprises a sequence that is at least 90% identical to any one of SEQ ID NOs: 226, SEQ ID NO: 235, and SEQ ID NO: 232.

[0030] In some embodiments, the C11 hydroxylase comprises the sequence of any one of SEQ ID NOs: 280-281 and 305 or a sequence that is at least 90% identical to any one SEQ ID NOs: 280-281 and 305.

[0031] In some embodiments, the cytochrome P450 reductase comprises the sequence of any one of SEQ ID NOs: 282-283 and 306-307 or a sequence that is at least 90% identical to any one SEQ ID NOs: 282-283 and 306-307.

[0032] In some embodiments, the EPH comprises the sequence of any one of SEQ ID NOs: 284-292 and 309-310 or a sequence that is at least 90% identical to any one SEQ ID NOs: 284-292 and 309-310.

[0033] In some embodiments, the SQE comprises the sequence of any one of SEQ ID NOs: 293-295 and 312 or a sequence that is at least 90% identical to any one SEQ ID NOs: 293-295 and 312.

[0034] In some embodiments, the host cell further comprises a primary UGT. In some embodiments, the primary UGT comprises a sequence that is at least 90% identical to any one of SEQ ID NOs: 76, 101, 89, 71, 73, 97, 88, 85, 95, 96, 86, 92, 69, 66, 78, 75, 98, 90, 67, 91, 93, 65, 99, 68, 70, 72, 81, 83, 84, 103, 74, 79, 102, 62, 87.

[0035] In some embodiments, the primary UGT comprises the sequence of any one of SEQ ID NOs: 76, 101, 89, 71, 73, 97, 88, 85, 95, 96, 86, 92, 69, 66, 78, 75, 98, 90, 67, 91, 93, 65, 99, 68, 70, 72, 81, 83, 84, 103, 74, 79, 102, 62, and 87.

[0036] In some embodiments, the host cell is a yeast cell, a plant cell, or a bacterial cell.

[0037] In some embodiments, the host cell is a yeast cell. In some embodiments, the yeast cell is a Saccharomyces cerevisiae cell. In some embodiments, the yeast cell is a Yarrowia cell.

[0038] In some embodiments, the host cell has reduced or eliminated expression of EXG1.

[0039] In some embodiments, the host cell is a bacterial cell. In some embodiments, the bacterial cell is an E. coli cell.

[0040] Further aspects of the present disclosure provide methods of producing a mogroside comprising culturing any of the host cells disclosed herein at least one mogroside precursor.

[0041] In some embodiments, the mogroside precursor is selected from mogrol, MIE1, MIA1, MIIA, MIIA1, MIIE, MIII, MIIIA1, and MIIIE.

[0042] In some embodiments, the mogroside that is produced is selected from MIA1, MIIA1, MIIIA1, MIIE1, MIII, siamenoside I, and MIIIE.

[0043] Each of the limitations of the invention can encompass various embodiments of the invention. It is, therefore, anticipated that each of the limitations of the invention involving any one element or combinations of elements can be included in each aspect of the invention. This invention is not limited in its application to the details of construction and the arrangement of components set forth in the following description or illustrated in the drawings. The invention is capable of other embodiments and of being practiced or of being carried out in various ways.

### BRIEF DESCRIPTION OF DRAWINGS

[0044] The accompanying drawings are not intended to be drawn to scale. The drawings are illustrative only and are not required for enablement of the disclosure. For purposes of clarity, not every component may be labeled in every drawing. In the drawings:

[0045] FIGS. 1A-1D include schematic overviews of putative mogrol biosynthesis pathways and examples of UGT activity. SQS indicates squalene synthase, EPD indicates epoxidase, P450 indicates C11 hydroxylase, EPH indicates epoxide hydrolase, and CDS indicates cucurbitadienol synthase. FIG. 1A and FIG. 1B show putative mogrol biosynthesis pathways. FIG. 1C shows non-limiting examples of primary UGT activity. FIG. 1D shows non-limiting examples of secondary UGT activity.

[0046] FIG. 2 is a graph showing liquid chromatography-mass spectrometry (LC-MS) profiles of candidate UGTs that were identified in Example 1 as having primary glycosylation activity. Average mg/L of mogrol, mogroside I-A1 (MIA1), mogroside I-E1 (MIE1), and mogroside II-E (MIIE1) for each candidate UGT is shown. A UGT that was known to have primary glycosylation activity was used as a positive control, and GFP was used as a negative control. UGT candidates were expressed by chromosomal integration in a chassis strain.

[0047] FIGS. 3A-3C depicts candidate UGTs from FIG. 2 that demonstrated considerable primary glycosylation activity. FIG. 3A depicts candidate UGTs with MIA1 (C24 glycosylation) activity. FIG. 3B depicts candidate UGTs with MIE1 (C3 glycosylation) activity. FIG. 3C depicts candidate UGTs with MIIE1 (C3 and C24 glycosylation) activity.

[0048] FIG. 4 is a graph depicting the mogroside profiles for two candidate UGTs that were identified in Example 2 as having secondary glycosylation activity. Mogroside profiles are shown as percentages of MIs, MIIs, MIIIs, MIVs, and MVs. A UGT that was known to have secondary glycosylation activity was used as a positive control, and GFP was used as a negative control. UGT candidates were expressed by chromosomal integration in a chassis strain.

[0049] FIG. 5 is a graph depicting the mogroside profiles for nine candidate UGTs that were identified in Example 3 as having secondary glycosylation activity. Mogroside profiles are shown as percentages of MIs, MIIs, MIIIs, MIVs, and MVs. A UGT that was known to have secondary glycosylation activity was used as a positive control, and GFP was used as a negative control. UGT candidates were expressed on plasmids in a chassis strain.

[0050] FIG. 6 depicts UGT taxa clustered by activity including UGTs that produce MIA1, UGTs that produced MIE1, UGTs that produced MIIE1, controls and inactive UGTs. PhyML was used to analyze the phylogeny. FigTree was used to generate the schematic.

[0051] FIG. 7 depicts UGT taxa clustered by Kingdom of Life. Unlabeled strains represent UGTs from Viridiplantae. Remaining strains include UGTs from viruses, bacteria, archaea, metazoan or are of unknown origin as illustrated. PhyML was used to analyze the phylogeny. FigTree was used to generate the schematic.

[0052] FIG. 8 is a schematic depicting m3710903 (SEQ ID NO: 65), m3953944 (SEQ ID NO: 75), m3710885 (SEQ ID NO: 62), and m3954606 (SEQ ID NO: 89) each superimposed onto the structure of a reference UGT (SEQ ID NO: 121). Rectangles are used to highlight structural differences between each UGT and the reference UGT. Circles are used to highlight sequence insertions between each UGT and the reference UGT.

[0053] FIGS. 9A-9B include graphs depicting mogroside profiles for candidate primary UGTs as described in Example 5. FIG. 9A shows the concentration in mg/L of MIA1, MIE1, MIIA1, and mogrol produced by the indicated strains. FIG. 9B shows the concentration in mg/L of MIIA1, MIIE1, MIII, MIIIA1, MIIIA2, MIIIE, siamenoside I (Sia), and MV produced by the indicated strains.

### DETAILED DESCRIPTION

[0054] Mogrosides are widely used as natural sweeteners, for example in beverages. However, de novo synthesis and mogroside extraction from natural sources often involves high production costs and low yield. This disclosure provides host cells that are engineered to efficiently produce mogrol (or 11, 24, 25-trihydroxy cucurbitadienol), mogrosides, and precursors thereof. Methods include heterologous expression of cucurbitadienol synthase (CDS) enzymes, UDP-glycosyltransferase (UGT) enzymes, C11 hydroxylase enzymes, cytochrome P450 reductase enzymes, epoxide hydrolase (EPH) enzymes, squalene epoxidase (SQE) enzymes, or combinations thereof. Examples 1-3 describe the identification of primary and secondary UGT enzymes for mogroside production. Enzymes and host cells described in this disclosure can be used for making mogrol, mogrosides, and precursors thereof.

### Synthesis of Mogrol and Mogrosides

[0055] FIGS. 1A-1B show putative mogrol synthesis pathways. An early step in the pathway involves conversion of squalene to 2,3-oxidoqualene. As shown in FIGS. 1A, 2,3-oxidosqualene can be first cyclized to cucurbitadienol followed by epoxidation to form 24,25-epoxycucurbitadienol, or 2,3-oxidosqualene can be epoxidized to 2,3,22,23-dioxidosqualene and then cyclized to 24,25-epoxycucurbitadienol. Next, the 24,25-epoxycucurbitadienol can be converted to mogrol (an aglycone of mogrosides) following epoxide hydrolysis and then oxidation, or oxidation and then epoxide hydrolysis. As shown in FIGS. 1B, 2,3-oxidosqualene can be first cyclized to cucurbitadienol, which is then converted to 11-hydroxycucurbitadienol by a cytochrome P450 C11 hydroxylase. Then, a cytochrome P450 C11 hydroxylase may convert 11-hydroxycucurbitadienol to 11-hydroxy-24,25-epoxycucurbitadienol. 11-hydroxy-24,25-epoxycucurbitadienol may be converted to mogrol by epoxide hydrolase. C11 hydroxylases act in conjunction with cytochrome P450 reductases (not shown in FIGS. 1A-1B).

[0056] Mogrol can be distinguished from other cucurbitane triterpenoids by oxygenations at C3, C11, C24, and C25. Glycosylation of mogrol, for example at C3 and/or C24, leads to the formation of mogrosides.

[0057] Mogrol precursors include but are not limited to squalene, 2-3-oxidosqualene, 2,3,22,23-dioxidosqualene, cucurbitadienol, 24, 25-expoxycucurbitadienol, 11-hydroxycucurbitadienol, 11-hydroxy-24,25-epoxycucurbitadienol, 11-hydroxycucurbitadienol, 11-oxo-cucurbitadienol, and 24,25-dihydroxycucurbitadienol. The term “dioxidosqualene” may be used to refer to 2,3,22,23-diepoxy squalene or 2,3,22,23-dioxido squalene. The term “2,3-epoxysqualene” may be used interchangeably with the term “2-3-oxidosqualene.” As used in this application, mogroside precursors include mogrol precursors, mogrol and mogrosides.

[0058] Examples of mogrosides include, but are not limited to, mogroside I-A1 (MIA1), mogroside IE (MIE or M1E), mogroside II-A1 (MIIA1 or M2A1), mogroside II-A2 (MIIA2 or M2A2), mogroside III-A1 (MIIIA1 or M3A1), mogroside II-E (MIIE, MIIE1, or M2E), mogroside III (MIII or M3), siamenoside I (siamenoside), mogroside IV (MIV or M4), mogroside IVa (MIVA or M4A), isomogroside IV, mogroside III-E (MIIIE or M3E), mogroside V (MV or M5), and mogroside VI (MVI or M6). In some embodiments, the mogroside produced is siamenoside I, which may be referred to as Siam. In some embodiments, the mogroside produced is MIIIE. Unless otherwise noted, when used in the plural, the terms “M1s”, “MIs”, “M2s”, “MIIs”, “M3s”, “MIIIs”, “M4s”, “MIVs”, “MVs”, “M5s”, “M6s”, and “MVIs” each refer to a class of mogrosides. As a non-limiting example, M2s or MIIs may include MIIA1, MIIA, MIIA2, and/or MIIE1.

[0059] In other embodiments, a mogroside is a compound of Formula 1:

[chemical structure]

[0060] In some embodiments, the methods described in this application may be used to produce any of the compounds described in and incorporated by reference from US 2019/0071705, including compounds 1-20 as disclosed in US 2019/0071705. In some embodiments, the methods described in this application may be used to produce variants of any of the compounds described in and incorporated by reference from US 2019/0071705, including variants of compounds 1-20 as disclosed in US 2019/0071705. For example, a variant of a compound described in US 2019/0071705 can comprise a substitution of one or more alpha-glucosyl linkages in a compound described in US 2019/0071705 with one or more beta-glucosyl linkages. In some embodiments, a variant of a compound described in US 2019/0071705 comprises a substitution of one or more beta-glucosyl linkages in a compound described in US 2019/0071705 with one or more alpha-glucosyl linkages. In some embodiments, a variant of a compound described in US 2019/0071705 is a compound of Formula 1 shown above.

[0061] In some embodiments, a host cell comprising one or more enzymes described herein (e.g., a UDP-glycosyltransferase (UGT) enzyme, a cucurbitadienol synthase (CDS) enzyme, a C1 1 hydroxylase enzyme, a cytochrome P450 reductase enzyme, an epoxide hydrolase enzyme (EPH), and/or a squalene epoxidase enzyme (SQE)) is capable of producing at least at least 0.005 mg/L, at least 0.01 mg/L, at least 0.02 mg/L, at least 0.03 mg/L, at least 0.04 mg/L, at least 0.05 mg/L, at least 0.06 mg/L, at least 0.07 mg/L, at least 0.08 mg/L, at least 0.09 mg/L, at least 0.1 mg/L, at least 0.2 mg/L, at least 0.3 mg/L, at least 0.4 mg/L, at least 0.5 mg/L, at least 0.6 mg/L, at least 0.7 mg/L, at least 0.8 mg/L, at least 0.9 mg/L, at least 1 mg/L, at least 2 mg/L, at least 3 mg/L, at least 4 mg/L, at least 5 mg/L, at least 6 mg/L, at least 7 mg/L, at least 8 mg/L, at least 9 mg/L, at least 10 mg/L, at least 11 mg/L, at least 12 mg/L, at least 13 mg/L, at least 14 mg/L, at least 15 mg/L, at least 16 mg/L, at least 17 mg/L, at least 18 mg/L, at least 19 mg/L, at least 20 mg/L, at least 21 mg/L, at least 22 mg/L, at least 23 mg/L, at least 24 mg/L, at least 25 mg/L, at least 26 mg/L, at least 27 mg/L, at least 28 mg/L, at least 29 mg/L, at least 30 mg/L, at least 31 mg/L, at least 32 mg/L, at least 33 mg/L, at least 34 mg/L, at least 35 mg/L, at least 36 mg/L, at least 37 mg/L, at least 38 mg/L, at least 39 mg/L, at least 40 mg/L, at least 41 mg/L, at least 42 mg/L, at least 43 mg/L, at least 44 mg/L, at least 45 mg/L, at least 46 mg/L, at least 47 mg/L, at least 48 mg/L, at least 49 mg/L, at least 50 mg/L, at least 51 mg/L, at least 52 mg/L, at least 53 mg/L, at least 54 mg/L, at least 55 mg/L, at least 56 mg/L, at least 57 mg/L, at least 58 mg/L, at least 59 mg/L, at least 60 mg/L, at least 61 mg/L, at least 62 mg/L, at least 63 mg/L, at least 64 mg/L, at least 65 mg/L, at least 66 mg/L, at least 67 mg/L, at least 68 mg/L, at least 69 mg/L, at least 70 mg/L, at least 75 mg/L, at least 80 mg/L, at least 85 mg/L, at least 90 mg/L, at least 95 mg/L, at least 100 mg/L, at least 125 mg/L, at least 150 mg/L, at least 175 mg/L, at least 200 mg/L, at least 225 mg/L, at least 250 mg/L, at least 275 mg/L, at least 300 mg/L, at least 325 mg/L, at least 350 mg/L, at least 375 mg/L, at least 400 mg/L, at least 425 mg/L, at least 450 mg/L, at least 475 mg/L, at least 500 mg/L, at least 1,000 mg/L, at least 2,000 mg/L, at least 3,000 mg/L, at least 4,000 mg/L, at least 5,000 mg/L, at least 6,000 mg/L, at least 7,000 mg/L, at least 8,000 mg/L, at least 9,000 mg/L, or at least 10,000 mg/L of one or more mogrosides and/or mogroside precursors. In some embodiments, the mogroside is mogroside I-A1 (MIA1), mogroside IE (MIE or M1E), mogroside II-A1 (MIIA1 or M2A1), mogroside II-A2 (MIIA2 or M2A2), mogroside III-A1 (MIIIA1 or M3A1), mogroside II-E (MIIE, MIIE1, or M2E), mogroside III (MIII or M3), siamenoside I, mogroside IV (MIV or M4), mogroside IVa (MIVA or M4A), isomogroside IV, mogroside III-E (MIIIE or M3E), mogroside V (MV or M5), or mogroside VI (MVI or M6).

### UDP-Glycosyltransferases (UGT) Enzymes

[0062] Aspects of the present disclosure provide UDP-glycosyltransferase enzymes (UGTs), which may be useful, for example, in the production of a mogroside (e.g., mogroside I-A1 (MIA1), mogroside I-E (MIE), mogroside II-A1 (MIIA1), mogroside II-A2 (MIIA2), mogroside III-A1 (MIIIA1), mogroside II-E (MIIE, MIIE1, or M2E), mogroside III (MIII), siamenoside I, mogroside III-E (MIIIE), mogroside IV, mogroside IVa, isomogroside IV, mogroside V, or mogroside VI).

[0063] As used in this disclosure, a “UGT” refers to an enzyme that is capable of catalyzing the addition of the glycosyl group from a UTP-sugar to a compound (e.g., mogroside or mogrol). A UGT may be a primary and/or a secondary UGT.

[0064] A “primary” UGT, or a UGT that has “primary glycosylation activity,” refers to a UGT that is capable of catalyzing the addition of a glycosyl group to a position on a compound that does not comprise a glycosyl group. For example, a primary UGT may be capable of adding a glycosyl group to the C3 and/or C24 position of an isoprenoid substrate (e.g., mogrol). See, e.g., FIG. 1C.

[0065] A “secondary” UGT, or a UGT that has “secondary glycosylation activity,” refers to a UGT that is capable of catalyzing the addition of a glycosyl group to a position on a compound that already comprises a glycosyl group. See, e.g., FIG. 1D. As a non-limiting example, a secondary UGT may add a glycosyl group to a mogroside I-A1 (MIA1), mogroside I-E (MIE), mogroside II-A1 (MIIA1), mogroside II-A2 (MIIA2), mogroside III-A1 (MIIIA1), mogroside II-E (MIIE, MIIE1, or M2E), mogroside III (MIII),siamenoside I, mogroside III-E (MIIIE), mogroside IV, mogroside IVa, isomogroside IV, mogroside V, and/or mogroside VI.

[0066] Example 1 describes identification of primary UGTs. In some embodiments, a primary UGT of the present disclosure comprises a sequence (e.g., nucleic acid or amino acid sequence) that is at least 5%, at least 10%, at least 15%, at least 20%, at least 25%, at least 30%, at least 35%, at least 40%, at least 45%, at least 50%, at least 55%, at least 60%, at least 65%, at least 70%, at least 71%, at least 72%, at least 73%, at least 74%, at least 75%, at least 76%, at least 77%, at least 78%, at least 79%, at least 80%, at least 81%, at least 82%, at least 83%, at least 84%, at least 85%, at least 86%, at least 87%, at least 88%, at least 89%, at least 90%, at least 91%, at least 92%, at least 93%, at least 94%, at least 95%, at least 96%, at least 97%, at least 98%, at least 99%, or 100% identical, including all values in between, to a sequence in Table 8 or Table 11, or to a sequence selected from any one of SEQ ID NOs: 1-2, 4-18, 20, 22-45, 47-53, 62-63, 65-79, 81, 83-106, 108-114, 314-318, and 319-323, or to any UGT sequence disclosed in this application or known in the art.

[0067] In some embodiments, a primary UGT of the present disclosure comprises a sequence that is at least 5%, at least 10%, at least 15%, at least 20%, at least 25%, at least 30%, at least 35%, at least 40%, at least 45%, at least 50%, at least 55%, at least 60%, at least 65%, at least 70%, at least 71%, at least 72%, at least 73%, at least 74%, at least 75%, at least 76%, at least 77%, at least 78%, at least 79%, at least 80%, at least 81%, at least 82%, at least 83%, at least 84%, at least 85%, at least 86%, at least 87%, at least 88%, at least 89%, at least 90%, at least 91%, at least 92%, at least 93%, at least 94%, at least 95%, at least 96%, at least 97%, at least 98%, at least 99%, or 100% identical, including all values in between, to a sequence selected from SEQ ID NOs: 65-73, 75, 76, 78, 81, 83-86, 88-101, 62, 74, 79, 87, 102, 103, 63, 77, 84, and 94.

[0068] In some embodiments, a primary UGT of the present disclosure comprises a sequence that is at least 5%, at least 10%, at least 15%, at least 20%, at least 25%, at least 30%, at least 35%, at least 40%, at least 45%, at least 50%, at least 55%, at least 60%, at least 65%, at least 70%, at least 71%, at least 72%, at least 73%, at least 74%, at least 75%, at least 76%, at least 77%, at least 78%, at least 79%, at least 80%, at least 81%, at least 82%, at least 83%, at least 84%, at least 85%, at least 86%, at least 87%, at least 88%, at least 89%, at least 90%, at least 91%, at least 92%, at least 93%, at least 94%, at least 95%, at least 96%, at least 97%, at least 98%, at least 99%, or 100% identical, including all values in between, to a sequence selected from SEQ ID NOs: 76, 101, 89, 71, 73, 97, 88, 85, 95, 96, 86, 92, 69, 66, 78, 75, 98, 90, 67, 91, 93, 65, 99, 68, 70, 72, 81, 83, 84, 103, 74, 79, 102, 62, and 87.

[0069] In some embodiments, a primary UGT is be capable of adding a glycosyl group to the C24 position of an isoprenoid substrate and comprises a sequence that is at least 5%, at least 10%, at least 15%, at least 20%, at least 25%, at least 30%, at least 35%, at least 40%, at least 45%, at least 50%, at least 55%, at least 60%, at least 65%, at least 70%, at least 71%, at least 72%, at least 73%, at least 74%, at least 75%, at least 76%, at least 77%, at least 78%, at least 79%, at least 80%, at least 81%, at least 82%, at least 83%, at least 84%, at least 85%, at least 86%, at least 87%, at least 88%, at least 89%, at least 90%, at least 91%, at least 92%, at least 93%, at least 94%, at least 95%, at least 96%, at least 97%, at least 98%, at least 99%, or 100% identical, including all values in between, to a sequence selected from SEQ ID NOs: 76, 101, 89, 71, 73, 97, 88, 85, 95, 96, 86, 92, 69, 66, 78, 75, 98, 90, 67, 91, 93, 65, 99, 68, 70, 72, 81, 83, and 84.

[0070] In some embodiments, a primary UGT is be capable of adding a glycosyl group to the C3 position of an isoprenoid substrate and comprises a sequence that is at least 5%, at least 10%, at least 15%, at least 20%, at least 25%, at least 30%, at least 35%, at least 40%, at least 45%, at least 50%, at least 55%, at least 60%, at least 65%, at least 70%, at least 71%, at least 72%, at least 73%, at least 74%, at least 75%, at least 76%, at least 77%, at least 78%, at least 79%, at least 80%, at least 81%, at least 82%, at least 83%, at least 84%, at least 85%, at least 86%, at least 87%, at least 88%, at least 89%, at least 90%, at least 91%, at least 92%, at least 93%, at least 94%, at least 95%, at least 96%, at least 97%, at least 98%, at least 99%, or 100% identical, including all values in between, to a sequence selected from SEQ ID NOs: 103, 74, 79, 102, 62, and 87.

[0071] In some embodiments, a primary UGT is be capable of adding a glycosyl group to the C3 position of an isoprenoid substrate and comprises a sequence that is at least 5%, at least 10%, at least 15%, at least 20%, at least 25%, at least 30%, at least 35%, at least 40%, at least 45%, at least 50%, at least 55%, at least 60%, at least 65%, at least 70%, at least 71%, at least 72%, at least 73%, at least 74%, at least 75%, at least 76%, at least 77%, at least 78%, at least 79%, at least 80%, at least 81%, at least 82%, at least 83%, at least 84%, at least 85%, at least 86%, at least 87%, at least 88%, at least 89%, at least 90%, at least 91%, at least 92%, at least 93%, at least 94%, at least 95%, at least 96%, at least 97%, at least 98%, at least 99%, or 100% identical, including all values in between, to a sequence selected from SEQ ID NOs: 103, 74, 79, 102, 62, 87, and 63.

[0072] In some embodiments, a primary UGT comprises a sequence that is at least 90% identical to any one of SEQ ID NOs: 65-73, 75, 76, 78, 81, 83-86, and 88-101, and is capable of catalyzing conversion of mogrol to MIA1. In some embodiments, the primary UGT comprises the sequence of any one of SEQ ID NOs: 65-73, 75, 76, 78, 81, 83-86, and 88-101.

[0073] In some embodiments, a primary UGT comprises a sequence that is at least 90% identical to any one of SEQ ID NOs: 62, 74, 79, 87, 102, and 103, and is capable of catalyzing conversion of mogrol to MIE1. In some embodiments, the primary UGT comprises the sequence of any one of SEQ ID NOs: 62, 74, 79, 87, 102, and 103.

[0074] In some embodiments, a primary UGT comprises a sequence that is at least 90% identical to any one of SEQ ID NOs: 63, 77, 84, and 94, and is capable of catalyzing conversion of mogrol to MIIE1. In some embodiments, the primary UGT comprises the sequence of any one of SEQ ID NOs: 63, 77, 84, and 94.

[0075] In some embodiments, a primary UGT comprises a sequence that is at least 80%, at least 81%, at least 82%, at least 83%, at least 84%, at least 85%, at least 86%, at least 87%, at least 88%, at least 89%, at least 90%, at least 91%, at least 92%, at least 93%, at least 94%, at least 95%, at least 96%, at least 97%, at least 98%, at least 99%, or 100% identical to SEQ ID NO: 65, 66, or 68. In some embodiments, a sequence that is at least 80% identical to SEQ ID NO: 65 is SEQ ID NO: 88 or SEQ ID NO: 66. In some embodiments, a sequence that is at least 90%, at least 91%, at least 92%, at least 93%, at least 94%, at least 95%, at least 96%, at least 97%, at least 98%, or at least 99% identical to SEQ ID NO: 66 is SEQ ID NO: 88.

[0076] In some embodiments, a primary UGT comprises a sequence that is at least 80%, at least 81%, at least 82%, at least 83%, at least 84%, at least 85%, at least 86%, at least 87%, at least 88%, at least 89%, at least 90%, at least 91%, at least 92%, at least 93%, at least 94%, at least 95%, at least 96%, at least 97%, at least 98%, at least 99%, or 100% identical to SEQ ID NO: 96 or 97. In some embodiments, a sequence that is at least 80%, at least 81%, at least 82%, at least 83%, at least 84%, at least 85%, at least 86%, or at least 87% identical to SEQ ID NO: 96 is SEQ ID NO: 97.

[0077] In some embodiments, a primary UGT comprises a sequence that is at least 80%, at least 81%, at least 82%, at least 83%, at least 84%, at least 85%, at least 86%, at least 87%, at least 88%, at least 89%, at least 90%, at least 91%, at least 92%, at least 93%, at least 94%, at least 95%, at least 96%, at least 97%, at least 98%, at least 99%, or 100% identical to SEQ ID NO: 92 or 93. In some embodiments, a sequence that is at least 80% identical to SEQ ID NO: 92 is SEQ ID NO: 93.

[0078] In some embodiments, a primary UGT comprises a sequence that is at least 70%, at least 71%, at least 72%, at least 73%, at least 74%, at least 75%, at least 76%, at least 77%, at least 78%, at least 79%, at least 80%, at least 81%, at least 82%, at least 83%, at least 84%, at least 85%, at least 86%, at least 87%, at least 88%, at least 89%, at least 90%, at least 91%, at least 92%, at least 93%, at least 94%, at least 95%, at least 96%, at least 97%, at least 98%, at least 99%, or 100% identical to SEQ ID NO: 68 or 71. In some embodiments, a sequence that is at least 70% identical to SEQ ID NO: 68 is SEQ ID NO: 71. In some embodiments, a sequence that is at least 75% identical to SEQ ID NO: 68 is SEQ ID NO: 71.

[0079] In some embodiments, a primary UGT comprises a sequence that is at least 70%, at least 71%, at least 72%, at least 73%, at least 74%, at least 75%, at least 76%, at least 77%, at least 78%, at least 79%, at least 80%, at least 81%, at least 82%, at least 83%, at least 84%, at least 85%, at least 86%, at least 87%, at least 88%, at least 89%, at least 90%, at least 91%, at least 92%, at least 93%, at least 94%, at least 95%, at least 96%, at least 97%, at least 98%, at least 99%, or 100% identical to SEQ ID NO: 70 or 76. In some embodiments, a sequence that is at least 70% identical to SEQ ID NO: 70 is SEQ ID NO: 76. In some embodiments, a sequence that is at least 75% identical to SEQ ID NO: 70 is SEQ ID NO: 76.

[0080] In some embodiments, a primary UGT comprises a sequence that is at least 70%, at least 71%, at least 72%, at least 73%, at least 74%, at least 75%, at least 76%, at least 77%, at least 78%, at least 79%, at least 80%, at least 81%, at least 82%, at least 83%, at least 84%, at least 85%, at least 86%, at least 87%, at least 88%, at least 89%, at least 90%, at least 91%, at least 92%, at least 93%, at least 94%, at least 95%, at least 96%, at least 97%, at least 98%, at least 99%, or 100% identical to SEQ ID NO: 85, 95, 86, 81, 96, or 97. In some embodiments, a sequence that is at least 70% identical to SEQ ID NO: 96 is SEQ ID NO: 85, 95, 86, 81, or 97. In some embodiments, a sequence that is at least 75% identical to SEQ ID NO: 81 is 85, 95, 86, 96, or 97.

[0081] In some embodiments, a primary UGT comprises a sequence that is at least 70%, at least 71%, at least 72%, at least 73%, at least 74%, at least 75%, at least 76%, at least 77%, at least 78%, at least 79%, at least 80%, at least 81%, at least 82%, at least 83%, at least 84%, at least 85%, at least 86%, at least 87%, at least 88%, at least 89%, at least 90%, at least 91%, at least 92%, at least 93%, at least 94%, at least 95%, at least 96%, at least 97%, at least 98%, at least 99%, or 100% identical to SEQ ID NO: 90 or 91. In some embodiments, a sequence that is at least 70% identical to SEQ ID NO: 90 is SEQ ID NO: 91.

[0082] Examples 2 and 3 describe identification of secondary UGTs. In some embodiments, a secondary UGT of the present disclosure comprises a sequence (e.g., nucleic acid or amino acid sequence) that is at least 5%, at least 10%, at least 15%, at least 20%, at least 25%, at least 30%, at least 35%, at least 40%, at least 45%, at least 50%, at least 55%, at least 60%, at least 65%, at least 70%, at least 71%, at least 72%, at least 73%, at least 74%, at least 75%, at least 76%, at least 77%, at least 78%, at least 79%, at least 80%, at least 81%, at least 82%, at least 83%, at least 84%, at least 85%, at least 86%, at least 87%, at least 88%, at least 89%, at least 90%, at least 91%, at least 92%, at least 93%, at least 94%, at least 95%, at least 96%, at least 97%, at least 98%, at least 99%, or 100% identical, including all values in between, to a sequence in Table 8 or Table 11, or to a sequence selected from SEQ ID NOs: 1-2, 4-18, 20, 22-45, 47-53, 62-63, 65-79, 81, 83-106, 108-114, and 121, or to any UGT sequence disclosed in this application or known in the art.

[0083] In some embodiments, a secondary UGT comprises a sequence that is at least 5%, at least 10%, at least 15%, at least 20%, at least 25%, at least 30%, at least 35%, at least 40%, at least 45%, at least 50%, at least 55%, at least 60%, at least 65%, at least 70%, at least 71%, at least 72%, at least 73%, at least 74%, at least 75%, at least 76%, at least 77%, at least 78%, at least 79%, at least 80%, at least 81%, at least 82%, at least 83%, at least 84%, at least 85%, at least 86%, at least 87%, at least 88%, at least 89%, at least 90%, at least 91%, at least 92%, at least 93%, at least 94%, at least 95%, at least 96%, at least 97%, at least 98%, at least 99%, or 100% identical, including all values in between, to a sequence selected from SEQ ID NOs: 104-106 and 108-114.

[0084] The UGTs of the present disclosure may be capable of glycosylating mogrol or a mogroside at any of the oxygenated sites (e.g., at C3, C11, C24, and C25). In some embodiments, the UGT is capable of branching glycosylation (e.g., branching glycosylation of a mogroside at C3 or C24).

[0085] Non-limiting examples of suitable substrates for the UGTs of the present disclosure include mogrol and mogrosides (e.g., mogroside IA1 (MIA1), mogroside IE (MIE), mogroside II-A1 (MIIA1), mogroside III-A1 (MIIIA1), mogroside II-E (MIIE or MIIE1), mogroside III (MIII),or mogroside III-E (MIIIE), siamenoside I).

[0086] In some embodiments, the UGTs of the present disclosure are capable of producing mogroside IA1 (MIA1), mogroside IE (MIE), mogroside II-A1 (MIIA1), mogroside II-A2 (MIIA2), mogroside III-A1 (MIIIA1), mogroside II-E (MIIE or MIIE1), mogroside III (MIII),siamenoside I, mogroside III-E (MIIIE), mogroside IV, mogroside IVa, isomogroside IV, and/or mogroside V.

[0087] In some embodiments, the UGT is capable of catalyzing the conversion of mogrol to MIA1; mogrol to MIE1; MIA1 to MIIA1; MIE1 to MIIE1; MIIA1 to MIIIA1; MIA1 to MIIE1; MIIA1 to MIII; MIIIA1 to siamenoside I; MIIE1 to MIII; MIII to siamenoside I; MIIE1 to MIIIE; and/or MIIIE to siamenoside I.

[0088] It should be appreciated that activity, such as specific activity, of a UGT can be measured by any means known to one of ordinary skill in the art. In some embodiments, the activity, such as specific activity, of a UGT may be determined by measuring the amount of glycosylated mogroside produced per unit enzyme per unit time. For example, the activity, such as specific activity, may be measured in mmol glycosylated mogroside target produced per gram of enzyme per hour. In some embodiments, a UGT of the present disclosure may have an activity, such as specific activity, of at least 0.1 mmol (e.g., at least 1 mmol, at least 1.5 mmol, at least 2 mmol, at least 2.5 mmol, at least 3, at least 3.5 mmol, at least 4 mmol, at least 4.5 mmol, at least 5 mmol, at least 10 mmol, including all values in between) glycosylated mogroside target produced per gram of enzyme per hour.

[0089] In some embodiments, the activity, such as specific activity, of a UGT of the present disclosure is at least 1.1 fold (e.g., at least 1.3 fold, at least 1.5 fold, at least 1.7 fold, at least 1.9 fold, at least 2 fold, at least 2.5 fold, at least 3 fold, at least 4 fold, at least 5 fold, at least 10 fold, at least 20 fold, at least 30 fold, at least 40 fold, at least 50 fold, or at least 100 fold, including all values in between) greater than that of a control UGT. In some embodiments, the control UGT is a primary UGT. In some embodiments, the control UGT is a secondary UGT. In some embodiments, the control UGT is UGT94-289-1 (a wildtype UGT sequence from the monk fruit Siraitia grosvenorii provided by SEQ ID NO: 121). In some embodiments, for a UGT that has an amino acid substitution, a control UGT is the same UGT but without the amino acid substitution.

[0090] It should be appreciated that one of ordinary skill in the art would be able to characterize a protein as a UGT enzyme based on structural and/or functional information associated with the protein. For example, a protein can be characterized as a UGT enzyme based on its function, such as the ability to produce one or more mogrosides in the presence of a mogroside precursor, such as mogrol.

[0091] A UGT enzyme can be further characterized as a primary UGT based on its function of catalyzing the addition of a glycosyl group to a position on a compound that does not comprise a glycosyl group. A UGT enzyme can be characterized as a secondary UGT based on its function of catalyzing the addition of a glycosyl group to a position on a compound that already comprises a glycosyl group. In some embodiments, a UGT enzyme can be characterized as a both primary and a secondary UGT enzyme.

[0092] In other embodiments, a protein can be characterized as a UGT enzyme based on the percent identity between the protein and a known UGT enzyme. For example, the protein may be at least 10%, 15%, 20%, 25%, 30%, 35%, 40%, 45%, 50%, 55%, 60%, 65%, 70%, 75%, 80%, 85%, 90%, 91%, 92%, 93%, 94%, 95%, 96%, 97%, 98%, 99%, or 100% identical, including all values in between, to any of the UGT sequences described in this application or the sequence of any other UGT enzyme.

[0093] In other embodiments, a protein can be characterized as a UGT enzyme based on the presence of one or more domains in the protein that are associated with UGT enzymes. For example, in certain embodiments, a protein is characterized as a UGT enzyme based on the presence of a sugar binding domain and/or a catalytic domain, characteristic of UGT enzymes known in the art. In certain embodiments, the catalytic domain binds the substrate to be glycosylated.

[0094] In other embodiments, a protein can be characterized as a UGT enzyme based on a comparison of the three-dimensional structure of the protein compared to the three-dimensional structure of a known UGT enzyme. For example, a protein could be characterized as a UGT based on the number or position of alpha helical domains, beta-sheet domains, etc. It should be appreciated that a UGT enzyme can be a synthetic protein.

[0095] Structurally, UGTs often comprise a UDPGT (Prosite: PS00375) domain and a catalytic dyad. As a non-limiting example, one of ordinary skill in the art may identify a catalytic dyad in a UGT by aligning the UGT sequence to UGT94-289-1 and identifying the two residues in the UGT that correspond to histidine 21 (H21) and aspartate 122 (D122) of UGT94-289-1.

[0096] The amino acid sequence for UGT94-289-1 is:

MDAQRGHTTTILMFPWLGYGHLSAFLELAKSLSRRNFHIYFCSTSVNLDAIKP
KLPSSSSSDSIQLVELCLPSSPDQLPPHLHTTNALPPHLMPTLHQAFSMAAQHFAAILH
TLAPHLLIYDSFQPWAPQLASSLNIPAINFNTTGASVLTRMLHATHYPSSKFPISEFVL
HDYWKAMYSAAGGAVTKKDHKIGETLANCLHASCSVILINSFRELEEKYMDYLSVL
LNKKVVPVGPLVYEPNQDGEDEGYSSIKNWLDKKEPSSTVFVSFGSEYFPSKEEMEEI
AHGLEASEVHFIWVVRFPQGDNTSAIEDALPKGFLERVGERGMVVKGWAPQAKILK
HWSTGGFVSHCGWNSVMESMMFGVPIIGVPMHLDQPFNAGLAEEAGVGVEAKRDP
DGKIQRDEVAKLIKEVVVEKTREDVRKKAREMSEILRSKGEEKMDEMVAAISLFLKI
(SEQ ID NO: 121).

[0097] A non-limiting example of a nucleic acid sequence encoding UGT94-289-1 is:

atggacgcgcaacgcggacatacgactaccatcctgatgtttccgtggttggggtacggccaccttagtgcattcctcgaatt
agccaagagcttgtcgcgtaggaactttcatatttatttctgttccacatctgtcaatttagatgctataaaacccaaactaccatcatcttca
agttccgattctattcagcttgtagagttatgcttgccttcctcgccagaccaactacccccacacctgcatacaactaatgctctacctcc
acatctaatgcctaccctgcaccaggccttttcaatggcagctcaacattttgcagctatattacatactttagcaccgcacttgttaatctat
gattcgttccagccttgggcgccacaattggccagctctcttaacattcctgctattaattttaataccacgggtgccagtgtgctaacaag
aatgttacacgcgactcattacccatcttcaaagttcccaatctccgaatttgttttacatgattattggaaagcaatgtattcagcagctggt
ggtgctgttacaaaaaaggaccataaaataggagaaaccttggcaaactgtttacacgcttcttgctcggtaattctgatcaattcattcag
agagttggaagaaaaatacatggattacttgtctgtcttactaaacaagaaagttgtgcccgtgggtccgcttgtttatgagccaaaccaa
gatggcgaagacgaaggttatagttcgataaagaattggctcgataaaaaggagccctcctcaactgtctttgtttccttcgggtccgaat
attttccgtccaaagaagaaatggaagaaattgcccatggcttggaggctagcgaggtacactttatttgggtcgttagattcccacaag
gagacaatacttctgcaattgaagatgcccttcctaagggttttcttgagcgagtgggcgaacgtggaatggtggttaagggttgggctc
ctcaggccaaaattttgaaacattggagcacaggcggtttcgtaagtcattgtggatggaatagtgttatggagagcatgatgtttggtgt
acccataataggtgttccgatgcatttagatcaaccatttaatgcagggctcgcggaagaagcaggagtaggggtagaggctaaaagg
gaccctgatggtaagatacagagagatgaagtcgctaaactgatcaaagaagtggttgtcgaaaaaacgcgcgaagatgtcagaaag
aaggctagggaaatgtctgaaattttacgttcgaaaggtgaggaaaagatggacgagatggttgcagccattagtctcttcttgaagata
taa (SEQ ID NO: 60).

[0098] One of ordinary skill in the art would readily recognize how to determine for any UGT enzyme what amino acid residue corresponds to a specific amino acid residue in a reference UGT such as UGT94-289-1 (SEQ ID NO: 121) by, for example, aligning sequences and/or by comparing secondary or tertiary structures.

[0099] In certain embodiments, a UGT of the present disclosure comprises one or more structural motifs corresponding to a structural motif in wild-type UGT94-289-1 (e.g., corresponding to a structural motif that is shown in Table 1). In some embodiments, a UGT comprises structural motifs corresponding to all structural motifs in Table 1. In some embodiments, a UGT comprises a structural motif that corresponds to some but not all structural motifs shown in Table 1. In some embodiments, some structural motifs may diverge by having different lengths or different helicity. For example, a UGT of the present disclosure may comprise extended versions of loops 11, 16, 20, or a combination thereof. A UGT of the present disclosure may comprise loops that have greater helicity than their counterpart in UGT94-289-1 (e.g., loops 11, 16, 20, or a combination thereof in UGT94-289-1).

TABLE 1

Non-limiting Examples of Structural Motifs in Reference Sequence UGT94-289-1 (SEQ ID NO: 121)

| Structural Motif | Borders | Sequence | SEQ ID NO |
|---|---|---|---|
| Loop 1 | Metl-Thr9 | MDAQRGHTT | 122 |
| Beta Sheet 1 | Thr10-Phe14 | TILMF | 123 |
| Loop 2 | Pro15-Gly18 | PWLG | 124 |
| Alpha Helix 1 | Tyrl9-Arg34 | YGHLSAFLELAKSLSR | 125 |
| Loop3 | Arg35-Phe37 | RNF | 126 |
| Beta Sheet 2 | His38-Phe41 | HIYF | 127 |
| Loop 4 | Cys42-Thr44 | CST | 128 |
| Alpha Helix 2 | Ser45-A1a50 | SVNLDA | 129 |
| Loop 5 | Ile51-Ser61 | IKPKLPSSSSS | 130 |
| Beta Sheet 3 | Asp62-Gln65 | DSIQ | 131 |
| Loop 6 | Leu66-Leu88 | LVELCLPSSPDQLPPHLHTTNAL | 132 |
| Alpha Helix 3 | Pro89-A1a109 | PPHLMPTLHQAFSMAAQHFAA | 133 |
| Loop 7 | Ile110-His117 | ILHTLAPH | 134 |
| Beta Sheet 4 | Leu118-Asp122 | LLIYD | 135 |
| Loop 8 | Ser123-Pro126 | SFQP | 136 |
| Alpha Helix 4 | Trp127-Leu134 | WAPQLASSL | 137 |
| Loop 9 | Asn135-Pro137 | NIP | 138 |
| Beta Sheet 5 | Ala138-Asn143 | AINFN | 139 |
| Loop 10 | Thr144-Gly146 | TTG | 140 |
| Alpha Helix 5 | Ala147-His158 | ASVLTRMLHATH | 141 |
| Loop 11 | Tyr159-Tyr179 | YPSSKFPISEFVLHDYWKAMY | 142 |
| Alpha Helix 6 | Ser180-Gly183 | SAAG | 143 |
| Loop 12 | Glyl84-Lysl89 | GAVTKK | 144 |
| Alpha Helix 7 | Asp190-Ser204 | DHKIGETLANCLHAS | 145 |
| Loop 13 | Cys205-Ser206 | CS | 146 |
| Beta Sheet 6 | Val207-Ile210 | VILI | 147 |
| Loop 14 | Asn211-Glu217 | NSFRELE | 148 |
| Alpha Helix 8 | Glu218-Leu227 | EKYMDYLSVL | 149 |
| Loop 15 | Leu228-Asn229 | LN | 150 |
| Beta Sheet 7 | Lys230-Val232 | KKV | 151 |
| Loop 16 | Val233-Ser252 | VPVGPLVYEPNQDGEDEGYS | 152 |
| Alpha Helix 9 | Ser253-Lys261 | SIKNWLDKK | 153 |
| Loop 17 | Glu262-Ser265 | EPSS | 154 |
| Beta Sheet 8 | Thr266-Ser270 | TVFVS | 155 |
| Loop 18 | Phe271-Ser278 | FGSEYFPS | 156 |
| Alpha Helix 10 | Lys279-Ser292 | KEEMEEIAHGLEAS | 157 |
| Loop 19 | Glu293-His295 | EVH | 158 |
| Beta Sheet 9 | Phe296-Val300 | FIWVV | 159 |
| Alpha Helix 11 | Arg301-Asn307 | RFPQGDN | 160 |
| Loop 20 | Thr308-Gly318 | TSAIEDALPKG | 161 |
| Alpha Helix 12 | Phe319-Val323 | FLERV | 162 |
| Loop 21 | Gly324-Gly327 | GERG | 163 |
| Beta Sheet 10 | Met328-Lys331 | MVVK | 164 |
| Loop 22 | Gly332-Pro335 | GWAP | 165 |
| Alpha Helix 13 | Gln336-Lys341 | QAKILK | 166 |
| Loop 23 | His342-Gly346 | HWSTG | 167 |
| Beta Sheet 11 | Gly347-Ser350 | GFVS | 168 |
| Loop 24 | His351-Gly353 | HCG | 169 |
| Alpha Helix 14 | Trp354-Phe363 | WNSVMESMMF | 170 |
| Loop 25 | Gly364-Pro366 | GVP | 171 |
| Beta Sheet 12 | Ile367-Val370 | IIGV | 172 |
| Loop 26 | Pro371-Leu374 | PMHL | 173 |
| Alpha Helix 15 | Asp375-Ala386 | DQPFNAGLAEEA | 174 |
| Loop 27 | Gly387-Val388 | GV | 175 |
| Beta Sheet 13 | Gly389-Glu391 | GVE | 176 |
| Loop 28 | Ala392-Gln401 | AKRDPDGKIQ | 177 |
| Alpha Helix 16 | Arg402-Val414 | RDEVAKLIKEVVV | 178 |
| Loop 29 | Glu415 | E | 179 |
| Alpha Helix 17 | Lys416-Gly436 | KTREDVRKKAREMSEILRSKG | 180 |
| Loop 30 | Glu437-Met440 | EEKM | 181 |
| Alpha Helix 18 | Asp441-Leu451 | DEMVAAISLFL | 182 |
| Loop 31 | Lys452-Ile453 | KI | 183 |

[0100] In some embodiments, a UGT is a circularly permutated version of a reference UGT. In some embodiments, a UGT comprises a sequence that includes at least two motifs from Table 1 in a different order than a reference UGT. For example, if a reference UGT comprises a first motif that is located C-terminal to a second motif, the first motif may be located N-terminal to the second motif in a circularly permutated UGT.

[0101] A UGT may comprise one or more motifs selected from Loop 1, Beta Sheet 1, Loop 2, Alpha Helix 1, Loop 3, Beta Sheet 2, Loop 4, Alpha Helix 2, Loop 5, Beta Sheet 3, Loop 6, Alpha Helix 3, Loop 7, Beta Sheet 4, Loop 8, Alpha Helix 4, Loop 9, Beta Sheet 5, Loop 10, Alpha Helix 5, Loop 11, Alpha Helix 6, Loop 12, Alpha Helix 7, Loop 13, Beta Sheet 6, Loop 14, Alpha Helix 8, and Loop 15 from Table 1 located C-terminal to one or more motifs corresponding to one or more motifs selected from Beta Sheet 7, Loop 16, Alpha Helix 9, Loop 17, Beta Sheet 8, Loop 18, Alpha Helix 10, Loop 19, Beta Sheet 9, Alpha Helix 11, Loop 20, Alpha Helix 12, Loop 21, Beta Sheet 10, Loop 22, Alpha Helix 13, Loop 23, Beta Sheet 11, Loop 24, Alpha Helix 14, Loop 25, Beta Sheet 12, Loop 26, Alpha Helix 15, Loop 27, Beta Sheet 13, Loop 28, Alpha Helix 16, Loop 29, Alpha Helix 17, Loop 30, Alpha Helix 18, and Loop 31 in Table 1.

[0102] In some embodiments, the N-terminal portion of a UGT comprises a catalytic site, including a catalytic dyad, and/or a substrate-binding site. In some embodiments, the C-terminal portion of a UGT comprises a cofactor-binding site. Aspects of the disclosure include UGTs that have been circularly permutated. In some embodiments, in a circularly permutated version of a UGT, the N-terminal portion and the C-terminal portions may be reversed in whole or in part. For example, the C-terminal portion of a circularly permutated UGT may comprise a catalytic site, including a catalytic dyad, and/or a substrate-binding site, while the N-terminal portion may comprise a cofactor-binding site. In some embodiments, a circularly permutated version of a UGT comprises a heterologous polynucleotide encoding a UGT, wherein the UGT comprises: a catalytic dyad and a cofactor binding site, wherein the catalytic dyad is located C-terminal to the cofactor-binding site.

[0103] A circularly permutated UGT encompassed by the disclosure may exhibit different properties from the same UGT that has not undergone circular permutation. In some embodiments, a host cell expressing such a circularly permutated version of a UGT produces in the presence of at least one mogroside precursor at least 10%, 20%, 30%, 40%, 50%, 60%, 70%, 80%, 90%, or 100% more of one or more mogrosides relative to a host cell that comprises a heterologous polynucleotide encoding a reference UGT that is not circularly permutated, such as wild-type UGT94-289-1 (SEQ ID NO: 121). In some embodiments, a host cell expressing such a circularly permutated version of a UGT produces in the presence of at least one mogroside precursor at least 10%, 20%, 30%, 40%, 50%, 60%, 70%, 80%, 90%, or 100% less of one or more mogrosides relative to a host cell that comprises a heterologous polynucleotide encoding a reference UGT that is not circularly permutated, such as wild-type UGT94-289-1 (SEQ ID NO: 121).

[0104] In some embodiments, a UGT of the present disclosure may comprise an amino acid substitution at an amino acid residue corresponding to an amino acid residue in wild-type UGT94-289-1 (SEQ ID NO: 121). For example, an amino acid residue that contains a substitution can be an amino acid that corresponds to an amino acid residue in wild-type UGT94-289-1 (SEQ ID NO: 121) selected from, e.g., S123; F124; N143; T144; T145; V149; Y179; G18; S180; A181; G184; A185; V186; T187; K189; Y19; H191; K192; G194; E195; A198; F276; N355; H373; L374; N47; H83; T84; T85; N86; P89; and/or L92. Non-limiting examples of such amino acid substitutions include: S123 may be mutated to alanine, cysteine, glycine or valine, or to any conservative substitution of alanine, cysteine, glycine or valine; F124 may be mutated to tyrosine or to any conservative substitution of tyrosine; N143 may be mutated to alanine, cysteine, glutamate, isoleucine, leucine, methionine, glutamine, serine, threonine or valine, or to any conservative substitution of alanine, cysteine, glutamate, isoleucine, leucine, methionine, glutamine, serine, threonine or valine; T144 may be mutated to alanine, cysteine, asparagine or proline, or to any conservative substitution of alanine, cysteine, asparagine or proline; T145 may be mutated to alanine, cysteine, glycine, methionine, asparagine, glutamine, or serine, or any conservative substitution of alanine, cysteine, glycine, methionine, asparagine, glutamine, or serine; V149 may be mutated to cysteine, leucine or methionine, or to any conservative substitution of cysteine, leucine or methionine; Y179 may be mutated to glutamate, phenylalanine, histidine, isoleucine, lysine, leucine, valine, or tryptophan, or to any conservative substitution glutamate, phenylalanine, histidine, isoleucine, lysine, leucine, valine, or tryptophan; G18 may be mutated to serine or to any conservative substitution of serine; S180 may be mutated to alanine or valine, or to any conservative substitution of alanine or valine; A181 may be mutated to lysine or threonine, or to any conservative substitution of lysine or threonine; G184 may be mutated to alanine, cysteine, aspartate, glutamate, phenylalanine, histidine, isoleucine, lysine, methionine, asparagine, proline, glutamine, arginine, serine, threonine, or tyrosine, or to any conservative substitution of alanine, cysteine, aspartate, glutamate, phenylalanine, histidine, isoleucine, lysine, methionine, asparagine, proline, glutamine, arginine, serine, threonine, or tyrosine; A185 may be mutated to cysteine, aspartate, glutamate, glycine, lysine, leucine, methionine, asparagine, proline, glutamine, threonine, tryptophan or tyrosine, or to any conservative substitution of cysteine, aspartate, glutamate, glycine, lysine, leucine, methionine, asparagine, proline, glutamine, threonine, tryptophan or tyrosine; V186 may be mutated to alanine, cysteine, aspartate, glutamate, glycine, isoleucine, lysine, leucine, methionine, asparagine, proline, glutamine, arginine, threonine, tryptophan, or tyrosine, or to any conservative substitution of alanine, cysteine, aspartate, glutamate, glycine, isoleucine, lysine, leucine, methionine, asparagine, proline, glutamine, arginine, threonine, tryptophan, or tyrosine; T187 may be mutated to alanine, cysteine, aspartate, glutamate, glycine, histidine, isoleucine, lysine, leucine, asparagine, proline, arginine, serine, valine, tryptophan, or tyrosine, or to any conservative substitution of alanine, cysteine, aspartate, glutamate, glycine, histidine, isoleucine, lysine, leucine, asparagine, proline, arginine, serine, valine, tryptophan, or tyrosine; K189 may be mutated to alanine, cysteine, aspartate, glutamate, phenylalanine, glycine, histidine, isoleucine, leucine, methionine, proline, glutamine, arginine, serine, threonine, valine, tryptophan, or tyrosine, or to any conservative substitution thereof of alanine, cysteine, aspartate, glutamate, phenylalanine, glycine, histidine, isoleucine, leucine, methionine, proline, glutamine, arginine, serine, threonine, valine, tryptophan, or tyrosine; Y19 may be mutated to phenylalanine, histidine, leucine, or valine, or to any conservative substitution of phenylalanine, histidine, leucine, or valine; H191 may be mutated to alanine, cysteine, aspartate, glutamate, glycine, lysine, methionine, proline, glutamine, serine, threonine, valine, tryptophan, or tyrosine, or to any conservative substitution of mutated to alanine, cysteine, aspartate, glutamate, glycine, lysine, methionine, proline, glutamine, serine, threonine, valine, tryptophan, or tyrosine; K192 may be mutated to cysteine or phenylalanine, or to any conservative substitution of cysteine or phenylalanine; G194 may be mutated to aspartate, leucine, methionine, asparagine, proline, serine, or tryptophan, or to any conservative substitution of aspartate, leucine, methionine, asparagine, proline, serine, or tryptophan; E195 may be mutated to alanine, isoleucine, lysine, leucine, asparagine, glutamine, serine, threonine, or tyrosine, or to any conservative substitution of alanine, isoleucine, lysine, leucine, asparagine, glutamine, serine, threonine, or tyrosine; A198 may be mutated to cysteine, aspartate, glutamate, phenylalanine, histidine, isoleucine, lysine, leucine, methionine, asparagine, proline, glutamine, arginine, serine, threonine, valine, or tyrosine, or to any conservative substitution of cysteine, aspartate, glutamate, phenylalanine, histidine, isoleucine, lysine, leucine, methionine, asparagine, proline, glutamine, arginine, serine, threonine, valine, or tyrosine; F276 may be mutated to cysteine or glutamine, or to any conservative substitution of cysteine or glutamine; N355 may be mutated to glutamine or serine, or any conservative substitution thereof; H373 may be mutated to lysine, leucine, methionine, arginine, valine, or tyrosine, or to any conservative substitution of lysine, leucine, methionine, arginine, valine, or tyrosine; L374 may be mutated to alanine, cysteine, phenylalanine, histidine, methionine, asparagine, glutamine, serine, threonine, valine, tryptophan, or tyrosine, or to any conservative substitution of alanine, cysteine, phenylalanine, histidine, methionine, asparagine, glutamine, serine, threonine, valine, tryptophan, or tyrosine; N47 may be mutated to glycine or to any conservative substitution of glycine; H83 may be mutated to glutamine or tryptophan, or to any conservative substitution of glutamine or tryptophan; T84 may be mutated to tyrosine or to any conservative substitution of tyrosine; T85 may be mutated to glycine, lysine, proline, serine, or tyrosine, or to any conservative substitution of glycine, lysine, proline, serine, or tyrosine; N86 may be mutated to alanine, cysteine, glutamate, isoleucine, lysine, leucine, serine, tryptophan, or tyrosine, or to any conservative substitution of alanine, cysteine, glutamate, isoleucine, lysine, leucine, serine, tryptophan, or tyrosine; P89 may be mutated to methionine or serine or to any conservative substitution of methionine or serine; and/or L92 may be mutated to histidine or lysine or to any conservative substitution of histidine or lysine.

[0105] A UGT of the present disclosure can comprise a conservative amino acid substitution and/or a non-conservative amino acid substitution. In some embodiments, a UGT of the present disclosure comprises 1, 2, 3, 4, 5, 6, 7, 8, 9, 10 or more than 10 conservative amino acid substitution(s). In some embodiments, a UGT of the present disclosure comprises 1, 2, 3, 4, 5, 6, 7, 8, 9, 10 or more than 10 non-conservative amino acid substitutions. In some embodiments, a conservative or non-conservative amino acid substitution is not located in a conserved region of a UGT protein. In some embodiments, a conservative or non-conservative amino acid substitution is not located in a region corresponding to: residues 83 to 92; residues 179 to 198; residue N143; residue L374; residue H21; or residue D122 of wild-type UGT94-289-1. One of ordinary skill in the art would readily be able to test a UGT that comprises a conservative and/or non-conservative substitution to determine whether the conservative and/or non-conservative substitution impacts the activity or function of the UGT.

[0106] In some embodiments, a UGT enzyme contains an amino acid substitution located within 10 angstrom, 9 angstrom 8 angstrom, 7 angstrom, 6 angstrom, 5 angstrom, 4 angstrom, 3 angstrom, 2 angstrom, or within 1 angstrom (including all values in between) of a catalytic dyad. The catalytic dyad may correspond to residues 21 and 122 of wildtype UGT94-289-1 (e.g., histidine 21 and aspartate acid 122). It should be appreciated that one of ordinary skill in the art would readily recognize how to determine to corresponding location of the catalytic dyad in any UGT enzyme, for example, by aligning the sequence and/or by comparing the secondary structure with UGT94-289-1 (SEQ ID NO: 121).

[0107] In some embodiments, a UGT enzyme contains an amino acid substitution at an amino acid residue located in one or more structural motifs of the UGT. Non-limiting examples of secondary structures in UGTs, such as UGT94-289-1 (SEQ ID NO: 121), include: the loop between beta sheet 4 and alpha helix 5; beta sheet 5; the loop between beta sheet 5 and alpha helix 6; alpha helix 6; the loop between alpha helix 6 & 7; the loop between beta sheet 1 & alpha helix 1; alpha helix 7; the loop between alpha helix 7 & 8; alpha helix 1; alpha helix 8; the loop between beta sheet 8 & alpha helix 13; alpha helix 17; the loop between beta sheet 12 & alpha helix 18; alpha helix 2; loop between beta sheet 3 & alpha helix 3; alpha helix 3; and the loop between alpha helix 3 & 4; loop 8; beta sheet 5; loop 10; alpha helix 5; loop 11; loop 2; alpha helix 6; loop 12; alpha helix 1; alpha helix 7; loop 18; alpha helix 14; loop 26; alpha helix 2; loop 6; and alpha helix 3.

[0108] In some embodiments: the amino acid residue located in loop 8 is a residue corresponding to S123 or F124 in UGT94-289-1 (SEQ ID NO: 121); the amino acid residue located in beta sheet 5 is a residue corresponding to N143 in UGT94-289-1 (SEQ ID NO: 121); the amino acid residue located in loop 10 is a residue corresponding to T144 or T145 in UGT94-289-1 (SEQ ID NO: 121); the amino acid residue located in alpha helix 5 is a residue corresponding to V149 in UGT94-289-1 (SEQ ID NO: 121); the amino acid residue located in loop 11 is a residue corresponding to Y179 in UGT94-289-1 (SEQ ID NO: 121); the amino acid residue located in loop 2 is a residue corresponding to G18 in UGT94-289-1 (SEQ ID NO: 121); the amino acid residue located in alpha helix 6 is a residue corresponding to S180 or A181 in UGT94-289-1 (SEQ ID NO: 121); the amino acid residue located in loop 12 is a residue corresponding to G184, A185, V186, T187, or K189 in UGT94-289-1 (SEQ ID NO: 121); the amino acid residue located in alpha helix 1 is a residue corresponding to Y19 in UGT94-289-1 (SEQ ID NO: 121); the amino acid residue located in alpha helix 7 is a residue corresponding to H191, K192, G194, E195, or A198 in UGT94-289-1 (SEQ ID NO: 121); the amino acid residue located in loop 18 is a residue corresponding to F276 in UGT94-289-1 (SEQ ID NO: 121); the amino acid residue located in alpha helix 14 is a residue corresponding to N355 in UGT94-289-1 (SEQ ID NO: 121); the amino acid residue located in loop 26 is a residue corresponding to H373 or L374 in UGT94-289-1 (SEQ ID NO: 121); the amino acid residue located in alpha helix 2 is a residue corresponding to N47 in UGT94-289-1 (SEQ ID NO: 121); the amino acid residue located in loop 6 is a residue corresponding to H83, T84, T85, or N86 in UGT94-289-1 (SEQ ID NO: 121); and/or the amino acid residue located in alpha helix 3 is a residue corresponding to P89 or L92 in UGT94-289-1 (SEQ ID NO: 121).

[0109] In some embodiments, a UGT comprises an amino acid substitution (e.g., at least 1, 2, 3, 4, 5, 6, 7, or 8 substitutions) in a region corresponding to residues 83 to 92, 179 to 189, 1 to 82, 93 to 142, 144 to 178, 199 to 373, or 375 to 453 of UGT94-289-1 (SEQ ID NO: 121). In some embodiments, the UGT comprises an amino acid substitution at an amino acid residue corresponding to the amino acid residue in wild-type UGT94-289-1 (SEQ ID NO: 121) selected from: N143 and L374. In some embodiments, the residue corresponding to N143 is mutated to a negatively charged R group, a polar uncharged R group, or a nonpolar aliphatic R group. In some embodiments, the residue corresponding to L374 is mutated to a nonpolar aliphatic R group, a positively charged R group, a polar uncharged R group, or a nonpolar aromatic R group. In some embodiments, a UGT comprises a region that is at least 90% identical to residues 83 to 92 of UGT94-289-1 or at least 95% identical to residues 179 to 198 of UGT94-289-1. A UGT can comprise a region that is at least 70%, 71%, 72%, 73%, 74%, 75%, 76%, 77%, 78%, 79%, 80%, 81%, 82%, 83%, 84%, 85%, 86%, 87%, 88%, 89%, 90%, 91%, 92%, 93%, 94%, 95%, 96%, 97%, 98%, or at least 99% identical, or is 100% identical, to residues 83 to 92 of UGT94-289-1. A UGT can comprise a region that is at least 70%, 71%, 72%, 73%, 74%, 75%, 76%, 77%, 78%, 79%, 80%, 81%, 82%, 83%, 84%, 85%, 86%, 87%, 88%, 89%, 90%, 91%, 92%, 93%, 94%, 95%, 96%, 97%, 98%, or at least 99% identical, or is 100% identical, to residues 179 to 198 of UGT94-289-1 (SEQ ID NO: 121).

[0110] In some embodiments, a host cell comprises a heterologous polynucleotide encoding a UGT, wherein the UGT comprises a region that: corresponds to residues 83 to 92 of wild-type UGT94-289-1 (SEQ ID NO: 121), wherein the region comprises an amino acid substitution relative to residues 83 to 92 of wild-type UGT94-289-1 (SEQ ID NO: 121); and/or corresponds to residues 179 to 198 of wild-type UGT94-289-1 (SEQ ID NO: 121), wherein the region comprises an amino acid substitution relative to residues 179 to 198 of wild-type UGT94-289-1 (SEQ ID NO: 121). It should be appreciated that the language “an amino acid substitution” is not limited to one amino acid substitution, but also encompasses embodiments including more than one amino acid substitution. In some embodiments, a host cell comprises a heterologous polynucleotide encoding a UGT, wherein the UGT comprises a region that: corresponds to residues 83 to 92 of wild-type UGT94-289-1 (SEQ ID NO: 121), wherein the region comprises no more than one amino acid substitution relative to residues 83 to 92 of wild-type UGT94-289-1 (SEQ ID NO: 121); and/or corresponds to residues 179 to 198 of wild-type UGT94-289-1 (SEQ ID NO: 121), wherein the region comprises no more than one amino acid substitution relative to residues 179 to 198 of wild-type UGT94-289-1 (SEQ ID NO: 121).

[0111] In some embodiments, the UGT comprises an amino acid substitution at an amino acid residue corresponding to the amino acid residue in wild-type UGT94-289-1 (SEQ ID NO: 121) selected from: H83, T84, T85, N86, P89, L92, Y179, S180, A181, G184, A185, V186, T187, K189, H191, K192, G194, E195, or A198.

[0112] In some embodiments, the residue corresponding to H83 is mutated to an amino acid comprising a polar uncharged R group or a nonpolar aromatic R group; the residue corresponding to T84 is mutated to an amino acid comprising a nonpolar aromatic R group; the residue corresponding to T85 is mutated to an amino acid comprising a nonpolar aliphatic R group, a positively charged R group, a polar uncharged R group, or a nonpolar aromatic R group; the residue corresponding to N86 is mutated to an amino acid comprising a nonpolar aliphatic R group, a polar uncharged R group, a negatively charged R group, a positively charged R group, or a nonpolar aromatic R group; the residue corresponding to P89 is mutated to an amino acid comprising a nonpolar aliphatic R group, or a polar uncharged R group; the residue corresponding to L92 is mutated to an amino acid comprising a positively charged R group; the residue corresponding to Y179 is mutated to an amino acid comprising a negatively charged R group, a nonpolar aromatic R group, a positively charged R group, or a nonpolar aliphatic R group; the residue corresponding to S180 is mutated to an amino acid comprising a nonpolar aliphatic R group; the residue corresponding to A181 is mutated to an amino acid comprising a positively charged R group or a polar uncharged R group; the residue corresponding to G184 is mutated to an amino acid comprising a nonpolar aliphatic R group, a polar uncharged R group, a negatively charged R group, a nonpolar aromatic R group, or a positively charged R group; the residue corresponding to A185 is mutated to an amino acid comprising a polar uncharged R group, a negatively charged R group, a nonpolar aliphatic R group, a positively charged R group, or a nonpolar aromatic R group; the residue corresponding to V186 is mutated to an amino acid comprising a nonpolar aliphatic R group, a polar uncharged R group, a negatively charged R group, a positively charged R group, or a nonpolar aromatic R group; the residue corresponding to T187 is mutated to an amino acid comprising a nonpolar aliphatic R group, a polar uncharged R group, a negatively charged R group, a positively charged R group, or a nonpolar aromatic R group; the residue corresponding to K189 is mutated to an amino acid comprising a nonpolar aliphatic R group, a polar uncharged R group, a negatively charged R group, a nonpolar aromatic R group, or a positively charged R group; the residue corresponding to H191 is mutated to an amino acid comprising a nonpolar aliphatic R group, a polar uncharged R group, a negatively charged R group, a positively charged R group, or a nonpolar aromatic R group; the residue corresponding to K192 is mutated to an amino acid comprising a polar uncharged R group or a nonpolar aromatic R group; the residue corresponding to G194 is mutated to an amino acid comprising a negatively charged R group, a nonpolar aliphatic R group, a polar uncharged R group, or a nonpolar aromatic R group; the residue corresponding to E195 is mutated to an amino acid comprising a nonpolar aliphatic R group, a positively charged R group, a polar uncharged R group, or a nonpolar aromatic R group; and/or the residue corresponding to A198 is mutated to an amino acid comprising a polar uncharged R group, a negatively charged R group, a nonpolar aromatic R group, a positively charged R group, or a nonpolar aliphatic R group.

[0113] In some embodiments, the UGT comprises an amino acid substitution at an amino acid residue corresponding to the amino acid residue in wild-type UGT94-289-1 (SEQ ID NO: 121) selected from: N143 and L374. In some embodiments, the residue corresponding to N143 is mutated to a negatively charged R group, a polar uncharged R group, or a nonpolar aliphatic R group. In some embodiments, the residue corresponding to L374 is mutated to a nonpolar aliphatic R group, a positively charged R group, a polar uncharged R group, or a nonpolar aromatic R group.

[0114] In some embodiments, a UGT does not comprise the sequence of SEQ ID NO: 121. In some embodiments, a UGT comprises less than 95%, less than 94%, less than 93%, less than 92%, less than 91%, less than 90%, less than 89%, less than 88%, less than 87%, less than 86%, less than 85%, less than 84%, less than 83%, less than 82%, less than 81%, less than 80%, less than 79%, less than 78%, less than 77%, less than 76%, less than 75%, less than 74%, less than 73%, less than 72%, less than 71%, less than 70%, less than 65%, less than 60%, less than 55%, less than 50%, less than 45%, less than 40%, less than 35%, or less than 30% identity to SEQ ID NO: 121.

### Cucurbitadienol Synthase (CDS) Enzymes

[0115] Aspects of the present disclosure provide cucurbitadienol synthase (CDS) enzymes, which may be useful, for example, in the production of a cucurbitadienol compound, such as 24-25 epoxy-cucurbitadienol or cucurbitadienol. CDSs are capable of catalyzing the formation of cucurbitadienol compounds, such as 24-25 epoxy-cucurbitadienol or cucurbitadienol from oxidosqualene (e.g., 2-3-oxidosqualene or 2,3; 22,23-diepoxysqualene).

[0116] In some embodiments, CDSs have a leucine at a residue corresponding to position 123 of SEQ ID NO: 256 that distinguishes them from other oxidosqualene cyclases, as discussed in Takase et al. Org. Biomol. Chem., 2015, 13, 7331-7336, which is incorporated by reference in its entirety.

[0117] CDSs of the present disclosure may comprise a sequence that is at least 5%, at least 10%, at least 15%, at least 20%, at least 25%, at least 30%, at least 35%, at least 40%, at least 45%, at least 50%, at least 55%, at least 60%, at least 65%, at least 70%, at least 71%, at least 72%, at least 73%, at least 74%, at least 75%, at least 76%, at least 77%, at least 78%, at least 79%, at least 80%, at least 81%, at least 82%, at least 83%, at least 84%, at least 85%, at least 86%, at least 87%, at least 88%, at least 89%, at least 90%, at least 91%, at least 92%, at least 93%, at least 94%, at least 95%, at least 96%, at least 97%, at least 98%, at least 99%, or 100% identical, including all values in between, to a nucleic acid or amino acid sequence in Table 9, to a sequence selected from SEQ ID NO: 184-263, 299, or 308, or to any other CDS sequence disclosed in this application or known in the art.

[0118] In some embodiments a CDS enzyme corresponds to AquAgaCDS16 (SEQ ID NO: 226), CSPI06G07180.1 (SEQ ID NO: 235), or A0A1S3CBF6 (SEQ ID NO: 232).

[0119] In some embodiments, a nucleic acid sequence encoding a CDS enzyme may be codon optimized for expression in a particular host cell, including S. cerevisiae. In some embodiments, a codon-optimized nucleic acid sequence encoding a CDS enzyme corresponds to SEQ ID NO: 186, 195 or 192.

[0120] In some embodiments, a CDS of the present disclosure is capable of using oxidosqualene (e.g., 2,3-oxidosqualene or 2,3; 22,23-diepoxysqualene) as a substrate. In some embodiments, a CDS of the present disclosure is capable of producing cucurbitadienol compounds (e.g., 24-25 epoxy-cucurbitadienol or cucurbitadienol). In some embodiments, a CDS of the present disclosure catalyzes the formation of cucurbitadienol compounds (e.g., 24-25 epoxy-cucurbitadienol or cucurbitadienol) from oxidosqualene (e.g., 2-3-oxidosqualene or 2,3; 22,23-diepoxysqualene).

[0121] It should be appreciated that activity of a CDS can be measured by any means known to one of ordinary skill in the art. In some embodiments, the activity of a CDS may be measured as the normalized peak area of cucurbitadienol produced. In some embodiments, this activity is measured in arbitrary units. In some embodiments, the activity, such as specific activity, of a CDS of the present disclosure is at least 1.1 fold (e.g., at least 1.3 fold, at least 1.5 fold, at least 1.7 fold, at least 1.9 fold, at least 2 fold, at least 2.5 fold, at least 3 fold, at least 4 fold, at least 5 fold, at least 10 fold, at least 20 fold, at least 30 fold, at least 40 fold, at least 50 fold, or at least 100 fold, including all values in between) greater than that of a control CDS.

[0122] It should be appreciated that one of ordinary skill in the art would be able to characterize a protein as a CDS enzyme based on structural and/or functional information associated with the protein. For example, in some embodiments, a protein can be characterized as a CDS enzyme based on its function, such as the ability to produce cucurbitadienol compounds (e.g., 24-25 epoxy-cucurbitadienol or cucurbitadienol) using oxidosqualene (e.g., 2,3-oxidosqualene or 2,3; 22,23-diepoxysqualene) as a substrate. In some embodiments, a protein can be characterized, at least in part, as a CDS enzyme based on the presence of a leucine residue at a position corresponding to position 123 of SEQ ID NO: 256.

[0123] In some embodiments, a host cell that comprises a heterologous polynucleotide encoding a CDS enzyme produces at least 10%, 20%, 30%, 40%, 50%, 60%, 70%, 80%, 90%, or 100% more cucurbitadienol compound compared to the same host cell that does not express the heterologous gene.

[0124] In other embodiments, a protein can be characterized as a CDS enzyme based on the percent identity between the protein and a known CDS enzyme. For example, the protein may be at least 10%, 15%, 20%, 25%, 30%, 35%, 40%, 45%, 50%, 55%, 60%, 65%, 70%, 75%, 80%, 85%, 90%, 91%, 92%, 93%, 94%, 95%, 96%, 97%, 98%, 99%, or 100% identical, including all values in between, to any of the CDS sequences described in this application or the sequence of any other CDS enzyme. In other embodiments, a protein can be characterized as a CDS enzyme based on the presence of one or more domains in the protein that are associated with CDS enzymes. For example, in certain embodiments, a protein is characterized as a CDS enzyme based on the presence of a substrate channel and/or an active-site cavity characteristic of CDS enzymes known in the art. In some embodiments, the active site cavity comprises a residue that acts a gate to this channel, helping to exclude water from the cavity. In some embodiments, the active-site comprises a residue that acts a proton donor to open the epoxide of the substrate and catalyze the cyclization process.

[0125] In other embodiments, a protein can be characterized as a CDS enzyme based on a comparison of the three-dimensional structure of the protein compared to the three-dimensional structure of a known CDS enzyme. It should be appreciated that a CDS enzyme can be a synthetic protein.

### C11 Hydroxylase Enzymes

[0126] Aspects of the present disclosure provide C11 hydroxylase enzymes, which may be useful, for example, in the production of mogrol.

[0127] A C11 hydroxylase of the present disclosure may comprise a sequence that is at least 5%, at least 10%, at least 15%, at least 20%, at least 25%, at least 30%, at least 35%, at least 40%, at least 45%, at least 50%, at least 55%, at least 60%, at least 65%, at least 70%, at least 71%, at least 72%, at least 73%, at least 74%, at least 75%, at least 76%, at least 77%, at least 78%, at least 79%, at least 80%, at least 81%, at least 82%, at least 83%, at least 84%, at least 85%, at least 86%, at least 87%, at least 88%, at least 89%, at least 90%, at least 91%, at least 92%, at least 93%, at least 94%, at least 95%, at least 96%, at least 97%, at least 98%, at least 99%, or at least 100% identical, including all values in between, with a C11 hydroxylase sequence (e.g., nucleic acid or amino acid sequence) in Tables 10 and 11, with a sequence set forth as SEQ ID NO: 264-265, 280-281, 296, or 305, or to any C11 hydroxylase sequence disclosed in this application or known in the art.

[0128] In some embodiments, a C11 hydroxylase of the present disclosure is capable of oxidizing mogrol precursors (e.g., cucurbitadienol, 11-hydroxycucurbitadienol, 24,25-dihydroxy-cucurbitadienol, and/or 24,25-epoxy-cucurbitadienol). In some embodiments, a C11 hydroxylase of the present disclosure catalyzes the formation of mogrol.

[0129] It should be appreciated that activity, such as specific activity, of a C11 hydroxylase can be determined by any means known to one of ordinary skill in the art. In some embodiments, activity (e.g., specific activity) of a C11 hydroxylase may be measured as the concentration of a mogrol precursor produced or mogrol produced per unit of enzyme per unit time. In some embodiments, a C11 hydroxylase of the present disclosure has an activity (e.g., specific activity) of at least 0.0001-0.001 µmol/min/mg, at least 0.001-0.01 µmol/min/mg, at least 0.01-0.1 µmol/min/mg, or at least 0.1-1 µmol/min/mg, including all values in between.

[0130] In some embodiments, the activity, such as specific activity, of a C11 hydroxylase is at least 1.1 fold (e.g., at least 1.3 fold, at least 1.5 fold, at least 1.7 fold, at least 1.9 fold, at least 2 fold, at least 2.5 fold, at least 3 fold, at least 4 fold, at least 5 fold, at least 10 fold, at least 20 fold, at least 30 fold, at least 40 fold, at least 50 fold, at least 100 fold, at least 1000 fold or at least 10000 fold, including all values in between) greater than that of a control C11 hydroxylase.

### Cytochrome P450 Reductase Enzymes

[0131] Aspects of the present disclosure provide cytochrome P450 reductase enzymes, which may be useful, for example, in the production of mogrol. Cytochrome P450 reductase is also referred to as NADPH:ferrihemoprotein oxidoreductase, NADPH:hemoprotein oxidoreductase, NADPH:P450 oxidoreductase, P450 reductase, POR, CPR, and CYPOR. These reductases can promote C11 hydroxylase activity by catalyzing electron transfer from NADPH to a C11 hydroxylase.

[0132] Cytochrome P450 reductases of the present disclosure may comprise a sequence that is at least 5%, at least 10%, at least 15%, at least 20%, at least 25%, at least 30%, at least 35%, at least 40%, at least 45%, at least 50%, at least 55%, at least 60%, at least 65%, at least 70%, at least 71%, at least 72%, at least73%, at least 74%, at least 75%, at least 76%, at least 77%, at least 78%, at least 79%, at least 80%, at least 81%, at least 82%, at least 83%, at least 84%, at least 85%, at least 86%, at least 87%, at least 88%, at least 89%, at least 90%, at least 91%, at least 92%, at least 93%, at least 94%, at least 95%, at least 96%, at least 97%, at least 98%, at least 99%, or at least 100% identical, including all values in between, with a cytochrome P450 reductase sequence (e.g., nucleic acid or amino acid sequence) in Tables 10 and 11, with a sequence set forth as SEQ ID NO: 266-267, 282-283, 297-298, or 306-307, or to any cytochrome p450 reductase disclosed in this application or known in the art.

[0133] In some embodiments, a cytochrome P450 reductase of the present disclosure is capable of promoting oxidation of a mogrol precursor (e.g., cucurbitadienol, 11-hydroxycucurbitadienol, 24,25-dihydroxy-cucurbitadienol, and/or 24,25-epoxy-cucurbitadienol). In some embodiments, a P450 reductase of the present disclosure catalyzes the formation of a mogrol precursor or mogrol.

[0134] It should be appreciated that activity (e.g., specific activity) of a cytochrome P450 reductase can be measured by any means known to one of ordinary skill in the art. In some embodiments, activity (e.g., specific activity) of a recombinant cytochrome P450 reductase may be measured as the concentration of a mogrol precursor produced or mogrol produced per unit enzyme per unit time in the presence of a C11 hydroxylase. In some embodiments, a cytochrome P450 reductase of the present disclosure has a activity (e.g., specific activity) of at least 0.0001-0.001 µmol/min/mg, at least 0.001-0.01 µmol/min/mg, at least 0.01-0.1 µmol/min/mg, or at least 0.1-1 µmol/min/mg, including all values in between.

[0135] In some embodiments, the activity (e.g., specific activity) of a cytochrome P450 reductase is at least 1.1 fold (e.g., at least 1.3 fold, at least 1.5 fold, at least 1.7 fold, at least 1.9 fold, at least 2 fold, at least 2.5 fold, at least 3 fold, at least 4 fold, at least 5 fold, at least 10 fold, at least 20 fold, at least 30 fold, at least 40 fold, at least 50 fold, at least 100 fold, at least 1000 fold or at least 10000 fold, including all values in between) greater than that of a control cytochrome P450 reductase.

### Epoxide Hydrolase Enzymes (EPHs)

[0136] Aspects of the present disclosure provide epoxide hydrolase enzymes (EPHs), which may be useful, for example, in the conversion of 24-25 epoxy-cucurbitadienol to 24-25 dihydroxy-cucurbitadienol or in the conversion of 11-hydroxy-24,25-epoxycucurbitadienol to mogrol. EPHs are capable of converting an epoxide into two hydroxyls.

[0137] EPHs of the present disclosure may comprise a sequence that is at least 5%, at least 10%, at least 15%, at least 20%, at least 25%, at least 30%, at least 35%, at least 40%, at least 45%, at least 50%, at least 55%, at least 60%, at least 65%, at least 70%, at least 71%, at least 72%, at least 73%, at least 74%, at least 75%, at least 76%, at least 77%, at least 78%, at least 79%, at least 80%, at least 81%, at least 82%, at least 83%, at least 84%, at least 85%, at least 86%, at least 87%, at least 88%, at least 89%, at least 90%, at least 91%, at least 92%, at least 93%, at least 94%, at least 95%, at least 96%, at least 97%, at least 98%, at least 99%, or at least 100% identical, including all values in between, with a EPH sequence (e.g., nucleic acid or amino acid sequence) in Tables 10 and 11, with a sequence set forth as SEQ ID NO: 268-276, 284-292, 300-301 or 309-310, or to any EPH sequence disclosed in this application or known in the art.

[0138] In some embodiments, a recombinant EPH of the present disclosure is capable of promoting hydrolysis of an epoxide in a cucurbitadienol compound (e.g., hydrolysis of the epoxide in 24-25 epoxy-cucurbitadienol). In some embodiments, an EPH of the present disclosure catalyzes the formation of a mogrol precursor (e.g., 24-25 dihydroxy-cucurbitadienol).

[0139] It should be appreciated that activity (e.g., specific activity) of an EPH can be measured by any means known to one of ordinary skill in the art. In some embodiments, activity (e.g., specific activity) of an EPH may be measured as the concentration of a mogrol precursor (e.g., 24-25 dihydroxy-cucurbitadienol) or mogrol produced. In some embodiments, a recombinant EPH of the present disclosure will allow production of at least 1-100 µg/L, at least 100-1000 µg/L, at least 1-100 mg/L, at least 100-1000 mg/L, at least 1-10 g/L or at least 10-100 g/L, including all values in between.

[0140] In some embodiments, the activity (e.g., specific activity) of an EPH is at least 1.1 fold (e.g., at least 1.3 fold, at least 1.5 fold, at least 1.7 fold, at least 1.9 fold, at least 2 fold, at least 2.5 fold, at least 3 fold, at least 4 fold, at least 5 fold, at least 10 fold, at least 20 fold, at least 30 fold, at least 40 fold, at least 50 fold, or at least 100 fold, including all values in between) greater than that of a control EPH.

### Squalene Epoxidases Enzymes (SQEs)

[0141] Aspects of the present disclosure provide squalene epoxidases (SQEs), which are capable of oxidizing a squalene (e.g., squalene or 2-3-oxidosqualene) to produce a squalene epoxide (e.g., 2-3-oxidosqualene or 2-3, 22-23-diepoxysqualene). SQEs may also be referred to as squalene monooxygenases.

[0142] SQEs of the present disclosure may comprise a sequence that is at least 5%, at least 10%, at least 15%, at least 20%, at least 25%, at least 30%, at least 35%, at least 40%, at least 45%, at least 50%, at least 55%, at least 60%, at least 65%, at least 70%, at least 71%, at least 72%, at least73%, at least 74%, at least 75%, at least 76%, at least 77%, at least 78%, at least 79%, at least 80%, at least 81%, at least 82%, at least 83%, at least 84%, at least 85%, at least 86%, at least 87%, at least 88%, at least 89%, at least 90%, at least 91%, at least 92%, at least 93%, at least 94%, at least 95%, at least 96%, at least 97%, at least 98%, at least 99%, or at least 100% identical, including all values in between, with a SQE sequence (e.g., nucleic acid or amino acid sequence) in Tables 10 and 11, with a sequence set forth as SEQ ID NO: 277-279, 293-295, 303 or 312, or to any SQE sequence disclosed in this application or known in the art.

[0143] In some embodiments, an SQE of the present disclosure is capable of promoting formation of an epoxide in a squalene compound (e.g., epoxidation of squalene or 2,3-oxidosqualene). In some embodiments, an SQE of the present disclosure catalyzes the formation of a mogrol precursor (e.g., 2-3-oxidosqualene or 2-3, 22-23-diepoxysqualene). Activity, such as specific activity, of a recombinant SQE may be measured as the concentration of a mogrol precursor (e.g., 2-3-oxidosqualene or 2-3, 22-23-diepoxysqualene) produced per unit of enzyme per unit of time. In some embodiments, an SQE of the present disclosure has an activity, such as specific activity, of at least 0.0000001 µmol/min/mg (e.g., at least 0.000001 µmol/min/mg, at least 0.00001 µmol/min/mg, at least 0.0001 µmol/min/mg, at least 0.001 µmol/min/mg, at least 0.01 µmol/min/mg, at least 0.1 µmol/min/mg, at least 1 µmol/min/mg, at least 10 µmol/min/mg, or at least 100 µmol/min/mg, including all values in between).

[0144] In some embodiments, the activity, such as specific activity, of a SQE is at least 1.1 fold (e.g., at least 1.3 fold, at least 1.5 fold, at least 1.7 fold, at least 1.9 fold, at least 2 fold, at least 2.5 fold, at least 3 fold, at least 4 fold, at least 5 fold, at least 10 fold, at least 20 fold, at least 30 fold, at least 40 fold, at least 50 fold, or at least 100 fold, including all values in between) greater than that of a control SQE.

### Variants

[0145] Aspects of the disclosure relate to polynucleotides encoding any of the recombinant polypeptides described, such as CDS, UGT, C11 hydroxylase, cytochrome P450 reductase, and EPH, and SQE enzymes. Variants of polynucleotide or amino acid sequences described in this application are also encompassed by the present disclosure. A variant may share at least 5%, at least 10%, at least 15%, at least 20%, at least 25%, at least 30%, at least 35%, at least 40%, at least 45%, at least 50%, at least 55%, at least 60%, at least 65%, at least 70%, at least 71%, at least 72%, at least 73%, at least 74%, at least 75%, at least 76%, at least 77%, at least 78%, at least 79%, at least 80%, at least 81%, at least 82%, at least 83%, at least 84%, at least 85%, at least 86%, at least 87%, at least 88%, at least 89%, at least 90%, at least 91%, at least 92%, at least 93%, at least 94%, at least 95%, at least 96%, at least 97%, at least 98%, at least 99%, or 100% sequence identity with a reference sequence, including all values in between.

[0146] Unless otherwise noted, the term “sequence identity,” as known in the art, refers to a relationship between the sequences of two polypeptides or polynucleotides, as determined by sequence comparison (alignment). In some embodiments, sequence identity is determined across the entire length of a sequence, while in other embodiments, sequence identity is determined over a region of a sequence.

[0147] Identity can also refer to the degree of sequence relatedness between two sequences as determined by the number of matches between strings of two or more residues (e.g., nucleic acid or amino acid residues). Identity measures the percent of identical matches between the smaller of two or more sequences with gap alignments (if any) addressed by a particular mathematical model, algorithms, or computer program.

[0148] Identity of related polypeptides or nucleic acid sequences can be readily calculated by any of the methods known to one of ordinary skill in the art. The “percent identity” of two sequences (e.g., nucleic acid or amino acid sequences) may, for example, be determined using the algorithm of Karlin and Altschul Proc. Natl. Acad. Sci. USA 87:2264-68, 1990, modified as in Karlin and Altschul Proc. Natl. Acad. Sci. USA 90:5873-77, 1993. Such an algorithm is incorporated into the NBLAST® and XBLAST® programs (version 2.0) of Altschul et al., J. Mol. Biol. 215:403-10, 1990. BLAST® protein searches can be performed, for example, with the XBLAST program, score=50, wordlength=3 to obtain amino acid sequences homologous to the protein molecules of the invention. Where gaps exist between two sequences, Gapped BLAST® can be utilized, for example, as described in Altschul et al., Nucleic Acids Res. 25(17):3389-3402, 1997. When utilizing BLAST® and Gapped BLAST® programs, the default parameters of the respective programs (e.g., XBLAST® and NBLAST®) can be used, or the parameters can be adjusted appropriately as would be understood by one of ordinary skill in the art.

[0149] Another local alignment technique which may be used, for example, is based on the Smith-Waterman algorithm (Smith, T.F. & Waterman, M.S. (1981) “Identification of common molecular subsequences.” J. Mol. Biol. 147:195-197). A general global alignment technique which may be used, for example, is the Needleman-Wunsch algorithm (Needleman, S.B. & Wunsch, C.D. (1970) “A general method applicable to the search for similarities in the amino acid sequences of two proteins.” J. Mol. Biol. 48:443-453), which is based on dynamic programming.

[0150] More recently, a Fast Optimal Global Sequence Alignment Algorithm (FOGSAA) was developed that purportedly produces global alignment of nucleic acid and amino acid sequences faster than other optimal global alignment methods, including the Needleman-Wunsch algorithm. In some embodiments, the identity of two polypeptides is determined by aligning the two amino acid sequences, calculating the number of identical amino acids, and dividing by the length of one of the amino acid sequences. In some embodiments, the identity of two nucleic acids is determined by aligning the two nucleotide sequences and calculating the number of identical nucleotide and dividing by the length of one of the nucleic acids.

[0151] For multiple sequence alignments, computer programs including Clustal Omega (Sievers et al., Mol Syst Biol. 2011 Oct 11;7:539) may be used.

[0152] In preferred embodiments, a sequence, including a nucleic acid or amino acid sequence, is found to have a specified percent identity to a reference sequence, such as a sequence disclosed in this application and/or recited in the claims when sequence identity is determined using the algorithm of Karlin and Altschul Proc. Natl. Acad. Sci. USA 87:2264-68, 1990, modified as in Karlin and Altschul Proc. Natl. Acad. Sci. USA 90:5873-77, 1993 (e.g., BLAST®, NBLAST®, XBLAST® or Gapped BLAST® programs, using default parameters of the respective programs).

[0153] In some embodiments, a sequence, including a nucleic acid or amino acid sequence, is found to have a specified percent identity to a reference sequence, such as a sequence disclosed in this application and/or recited in the claims when sequence identity is determined using the Smith-Waterman algorithm (Smith, T.F. & Waterman, M.S. (1981) “Identification of common molecular subsequences.” J. Mol. Biol. 147:195-197) or the Needleman-Wunsch algorithm (Needleman, S.B. & Wunsch, C.D. (1970) “A general method applicable to the search for similarities in the amino acid sequences of two proteins.” J. Mol. Biol. 48:443-453).

[0154] In some embodiments, a sequence, including a nucleic acid or amino acid sequence, is found to have a specified percent identity to a reference sequence, such as a sequence disclosed in this application and/or recited in the claims when sequence identity is determined using a Fast Optimal Global Sequence Alignment Algorithm (FOGSAA).

[0155] In some embodiments, a sequence, including a nucleic acid or amino acid sequence, is found to have a specified percent identity to a reference sequence, such as a sequence disclosed in this application and/or recited in the claims when sequence identity is determined using Clustal Omega (Sievers et al., Mol Syst Biol. 2011 Oct 11;7:539).

[0156] As used in this application, a residue (such as a nucleic acid residue or an amino acid residue) in sequence “X” is referred to as corresponding to a position or residue (such as a nucleic acid residue or an amino acid residue) “Z” in a different sequence “Y” when the residue in sequence “X” is at the counterpart position of “Z” in sequence “Y” when sequences X and Y are aligned using amino acid sequence alignment tools known in the art.

[0157] Variant sequences may be homologous sequences. As used in this application, homologous sequences are sequences (e.g., nucleic acid or amino acid sequences) that share a certain percent identity (e.g., at least 5%, at least 10%, at least 15%, at least 20%, at least 25%, at least 30%, at least 35%, at least 40%, at least 45%, at least 50%, at least 55%, at least 60%, at least 65%, at least 70%, at least 71%, at least 72%, at least 73%, at least 74%, at least 75%, at least 76%, at least 77%, at least 78%, at least 79%, at least 80%, at least 81%, at least 82%, at least 83%, at least 84%, at least 85%, at least 86%, at least 87%, at least 88%, at least 89%, at least 90%, at least 91%, at least 92%, at least 93%, at least 94%, at least 95%, at least 96%, at least 97%, at least 98%, at least 99%, or 100% percent identity, including all values in between). Homologous sequences include but are not limited to paralogous sequences, orthologous sequences, or sequences arising from convergent evolution. Paralogous sequences arise from duplication of a gene within a genome of a species, while orthologous sequences diverge after a speciation event. Two different species may have evolved independently but may each comprise a sequence that shares a certain percent identity with a sequence from the other species as a result of convergent evolution.

[0158] In some embodiments, a polypeptide variant (e.g., CDS, UGT, C11 hydroxylase, cytochrome P450 reductase, EPH, or SQE variant) comprises a domain that shares a secondary structure (e.g., alpha helix, beta sheet) with a reference polypeptide (e.g., a reference CDS, UGT, C11 hydroxylase, cytochrome P450 reductase, EPH, or SQE). In some embodiments, a polypeptide variant (e.g., CDS, UGT, C11 hydroxylase, cytochrome P450 reductase, EPH, or SQE variant) shares a tertiary structure with a reference polypeptide (e.g., a reference CDS, UGT, C11 hydroxylase, cytochrome P450 reductase, EPH, or SQE). As a non-limiting example, a variant polypeptide may have low primary sequence identity (e.g., less than 80%, less than 75%, less than 70%, less than 65%, less than 60%, less than 55%, less than 50%, less than 45%, less than 40%, less than 35%, less than 30%, less than 25%, less than 20%, less than 15%, less than 10%, or less than 5% sequence identity) compared to a reference polypeptide, but share one or more secondary structures (e.g., including but not limited to loops, alpha helices, or beta sheets, or have the same tertiary structure as a reference polypeptide. For example, a loop may be located between a beta sheet and an alpha helix, between two alpha helices, or between two beta sheets. Homology modeling may be used to compare two or more tertiary structures.

[0159] Mutations can be made in a nucleotide sequence by a variety of methods known to one of ordinary skill in the art. For example, mutations can be made by PCR-directed mutation, site-directed mutagenesis according to the method of Kunkel (Kunkel, Proc. Nat. Acad. Sci. U.S.A. 82: 488-492, 1985), by chemical synthesis of a gene encoding a polypeptide, by gene editing tools, or by insertions, such as insertion of a tag (e.g., a HIS tag or a GFP tag). Mutations can include, for example, substitutions, deletions, and translocations, generated by any method known in the art. Methods for producing mutations may be found in in references such as Molecular Cloning: A Laboratory Manual, J. Sambrook, et al., eds., Fourth Edition, Cold Spring Harbor Laboratory Press, Cold Spring Harbor, New York, 2012, or Current Protocols in Molecular Biology, F.M. Ausubel, et al., eds., John Wiley & Sons, Inc., New York, 2010.

[0160] In some embodiments, methods for producing variants include circular permutation (Yu and Lutz, Trends Biotechnol. 2011 Jan;29(1):18-25). In circular permutation, the linear primary sequence of a polypeptide can be circularized (e.g., by joining the N-terminal and C-terminal ends of the sequence) and the polypeptide can be severed (“broken”) at a different location. Thus, the linear primary sequence of the new polypeptide may have low sequence identity (e.g., less than 80%, less than 75%, less than 70%, less than 65%, less than 60%, less than 55%, less than 50%, less than 45%, less than 40%, less than 35%, less than 30%, less than 25%, less than 20%, less than 15%, less than 10%, less or less than 5%, including all values in between) as determined by linear sequence alignment methods (e.g., Clustal Omega or BLAST). Topological analysis of the two proteins, however, may reveal that the tertiary structure of the two polypeptides is similar or dissimilar. Without being bound by a particular theory, a variant polypeptide created through circular permutation of a reference polypeptide and with a similar tertiary structure as the reference polypeptide can share similar functional characteristics (e.g., enzymatic activity, enzyme kinetics, substrate specificity or product specificity). In some instances, circular permutation may alter the secondary structure, tertiary structure or quaternary structure and produce an enzyme with different functional characteristics (e.g., increased or decreased enzymatic activity, different substrate specificity, or different product specificity). See, e.g., Yu and Lutz, Trends Biotechnol. 2011 Jan;29(1): 18-25.

[0161] It should be appreciated that in a protein that has undergone circular permutation, the linear amino acid sequence of the protein would differ from a reference protein that has not undergone circular permutation. However, one of ordinary skill in the art would be able to determine which residues in the protein that has undergone circular permutation correspond to residues in the reference protein that has not undergone circular permutation by, for example, aligning the sequences and detecting conserved motifs, and/or by comparing the structures or predicted structures of the proteins, e.g., by homology modeling.

[0162] In some embodiments, an algorithm that determines the percent identity between a sequence of interest and a reference sequence described in this application accounts for the presence of circular permutation between the sequences. The presence of circular permutation may be detected using any method known in the art, including, for example, RASPODOM (Weiner et al., Bioinformatics. 2005 Apr 1;21(7):932-7). In some embodiments, the presence of circulation permutation is corrected for (e.g., the domains in at least one sequence are rearranged) prior to calculation of the percent identity between a sequence of interest and a sequence described in this application. The claims of this application should be understood to encompass sequences for which percent identity to a reference sequence is calculated after taking into account potential circular permutation of the sequence.

[0163] Functional variants of the recombinant CDSs, UGTs, C11 hydroxylases, cytochrome P450 reductases, EPHs, and squalene epoxidases disclosed in this application are also encompassed by the present disclosure. For example, functional variants may bind one or more of the same substrates (e.g., mogrol, mogroside, or precursors thereof) or produce one or more of the same products (e.g., mogrol, mogroside, or precursors thereof). Functional variants may be identified using any method known in the art. For example, the algorithm of Karlin and Altschul Proc. Natl. Acad. Sci. USA 87:2264-68, 1990 described above may be used to identify homologous proteins with known functions.

[0164] Putative functional variants may also be identified by searching for polypeptides with functionally annotated domains. Databases including Pfam (Sonnhammer et al., Proteins. 1997 Jul;28(3):405-20) may be used to identify polypeptides with a particular domain. For example, among oxidosqualene cyclases, additional CDS enzymes may be identified in some instances by searching for polypeptides with a leucine residue corresponding to position 123 of SEQ ID NO: 256. This leucine residue has been implicated in determining the product specificity of the CDS enzyme; mutation of this residue can, for instance, result in cycloartenol or parkeol as a product (Takase et al., Org Biomol Chem. 2015 Jul 13(26):7331-6).

[0165] Additional UGT enzymes may be identified, for example, by searching for polypeptides with a UDPGT domain (PROSITE accession number PS00375).

[0166] Homology modeling may also be used to identify amino acid residues that are amenable to mutation without affecting function. A non-limiting example of such a method may include use of position-specific scoring matrix (PSSM) and an energy minimization protocol. See, e.g., Stormo et al., Nucleic Acids Res. 1982 May 11;10(9):2997-3011.

[0167] PSSM may be paired with calculation of a Rosetta energy function, which determines the difference between the wild-type and the single-point mutant. Without being bound by a particular theory, potentially stabilizing mutations are desirable for protein engineering (e.g., production of functional homologs). In some embodiments, a potentially stabilizing mutation has a ΔΔG_{calc} value of less than -0.1 (e.g., less than -0.2, less than -0.3, less than -0.35, less than -0.4, less than -0.45, less than -0.5, less than -0.55, less than -0.6, less than -0.65, less than -0.7, less than -0.75, less than -0.8, less than -0.85, less than -0.9, less than -0.95, or less than -1.0) Rosetta energy units (R.e.u.). See, e.g., Goldenzweig et al., Mol Cell. 2016 Jul 21;63(2):337-346. doi: 10.1016/j.molcel.2016.06.012.

[0168] In some embodiments, a CDS, UGT, C11 hydroxylase, cytochrome P450 reductase, EPH, or SQE coding sequence comprises a mutation at 1, 2, 3, 4, 5, 6, 7, 8, 9, 10, 11, 12, 13, 14, 15, 16, 17, 18, 19, 20, 21, 22, 23, 24, 25, 26, 27, 28, 29, 30, 31, 32, 33, 34, 35, 36, 37, 38, 39, 40, 41, 42, 43, 44, 45, 46, 47, 48, 49, 50, 51, 52, 53, 54, 55, 56, 57, 58, 59, 60, 61, 62, 63, 64, 65, 66, 67, 68, 69, 70, 71, 72, 73, 74, 75, 76, 77, 78, 79, 80, 81, 82, 83, 84, 85, 86, 87, 88, 89, 90, 91, 92, 93, 94, 95, 96, 97, 98, 99, 100 or more than 100 positions corresponding to a reference coding sequence. In some embodiments, the CDS, UGT, C11 hydroxylase, cytochrome P450 reductase, EPH, or SQE coding sequence comprises a mutation in 1, 2, 3, 4, 5, 6, 7, 8, 9, 10, 11, 12, 13, 14, 15, 16, 17, 18, 19, 20, 21, 22, 23, 24, 25, 26, 27, 28, 29, 30, 31, 32, 33, 34, 35, 36, 37, 38, 39, 40, 41, 42, 43, 44, 45, 46, 47, 48, 49, 50, 51, 52, 53, 54, 55, 56, 57, 58, 59, 60, 61, 62, 63, 64, 65, 66, 67, 68, 69, 70, 71, 72, 73, 74, 75, 76, 77, 78, 79, 80, 81, 82, 83, 84, 85, 86, 87, 88, 89, 90, 91, 92, 93, 94, 95, 96, 97, 98, 99, 100 or more codons of the coding sequence relative to a reference coding sequence. As will be understood by one of ordinary skill in the art, a mutation within a codon may or may not change the amino acid that is encoded by the codon due to degeneracy of the genetic code. In some embodiments, the one or more mutations in the coding sequence do not alter the amino acid sequence of the coding sequence relative to the amino acid sequence of a reference polypeptide.

[0169] In some embodiments, the one or more mutations in a recombinant CDS, UGT, C11 hydroxylase, cytochrome P450 reductase, EPH, or SQE sequence alter the amino acid sequence of the polypeptide relative to the amino acid sequence of a reference polypeptide. In some embodiments, the one or more mutations alter the amino acid sequence of the recombinant polypeptide relative to the amino acid sequence of a reference polypeptide and alter (enhance or reduce) an activity of the polypeptide relative to the reference polypeptide.

[0170] The activity, including specific activity, of any of the recombinant polypeptides described in this application may be measured using methods known in the art. As a non-limiting example, a recombinant polypeptide’s activity may be determined by measuring its substrate specificity, product(s) produced, the concentration of product(s) produced, or any combination thereof. As used in this application, “specific activity” of a recombinant polypeptide refers to the amount (e.g., concentration) of a particular product produced for a given amount (e.g., concentration) of the recombinant polypeptide per unit time.

[0171] The skilled artisan will also realize that mutations in a recombinant polypeptide coding sequence may result in conservative amino acid substitutions to provide functionally equivalent variants of the foregoing polypeptides, e.g., variants that retain the activities of the polypeptides. As used in this application, a “conservative amino acid substitution” refers to an amino acid substitution that does not alter the relative charge or size characteristics or functional activity of the protein in which the amino acid substitution is made.

[0172] In some instances, an amino acid is characterized by its R group (see, e.g., Table 2). For example, an amino acid may comprise a nonpolar aliphatic R group, a positively charged R group, a negatively charged R group, a nonpolar aromatic R group, or a polar uncharged R group. Non-limiting examples of an amino acid comprising a nonpolar aliphatic R group include alanine, glycine, valine, leucine, methionine, and isoleucine. Non-limiting examples of an amino acid comprising a positively charged R group includes lysine, arginine, and histidine. Non-limiting examples of an amino acid comprising a negatively charged R group include aspartate and glutamate. Non-limiting examples of an amino acid comprising a nonpolar, aromatic R group include phenylalanine, tyrosine, and tryptophan. Non-limiting examples of an amino acid comprising a polar uncharged R group include serine, threonine, cysteine, proline, asparagine, and glutamine.

[0173] Non-limiting examples of functionally equivalent variants of polypeptides may include conservative amino acid substitutions in the amino acid sequences of proteins disclosed in this application. Conservative substitutions of amino acids include substitutions made amongst amino acids within the following groups: (a) M, I, L, V; (b) F, Y, W; (c) K, R, H; (d) A, G; (e) S, T; (f) Q, N; and (g) E, D. Additional non-limiting examples of conservative amino acid substitutions are provided in Table 2.

[0174] In some embodiments, 1, 2, 3, 4, 5, 6, 7, 8, 9, 10, 11, 12, 13, 14, 15, 16, 17, 18, 19, 20 or more than 20 residues can be changed when preparing variant polypeptides. In some embodiments, amino acids are replaced by conservative amino acid substitutions.

TABLE 2

Non-limiting Examples of conservative amino acid substitutions

| | | |
|---|---|---|
| Original Residue | R Group Type | Conservative Amino Acid Substitutions |
| Ala | nonpolar aliphatic R group | Cys, Gly, Ser |
| Arg | positively charged R group | His, Lys |
| Asn | polar uncharged R group | Asp, Gln, Glu |
| Asp | negatively charged R group | Asn, Gln, Glu |
| Cys | polar uncharged R group | Ala, Ser |
| Gln | polar uncharged R group | Asn, Asp, Glu |
| Glu | negatively charged R group | Asn, Asp, Gln |
| Gly | nonpolar aliphatic R group | Ala, Ser |
| His | positively charged R group | Arg. Tyr, Trp |
| Ile | nonpolar aliphatic R group | Leu, Met, Val |
| Leu | nonpolar aliphatic R group | Ile. Met, Val |
| Lys | positively charged R group | Arg, His |
| Met | nonpolar aliphatic R group | Ile. Leu, Phe, Val |
| Pro | polar uncharged R group | |
| Phe | nonpolar aromatic R group | Met, Trp, Tyr |
| Ser | polar uncharged R group | Ala, Gly, Thr |
| Thr | polar uncharged R group | Ala, Asn, Ser |
| Trp | nonpolar aromatic R group | His, Phe, Tyr, Met |
| Tyr | nonpolar aromatic R group | His, Phe, Trp |
| Val | nonpolar aliphatic R group | Ile, Leu, Met, Thr |

[0175] Amino acid substitutions in the amino acid sequence of a polypeptide to produce a recombinant polypeptide variant having a desired property and/or activity can be made by alteration of the coding sequence of the polypeptide. Similarly, conservative amino acid substitutions in the amino acid sequence of a polypeptide to produce functionally equivalent variants of the polypeptide typically are made by alteration of the coding sequence of the recombinant polypeptide (e.g., UGT, CDS, P450, cytochrome P450 reductase, EPH, or squalene epoxidase).

### Expression of Nucleic Acids in Host Cells

[0176] Aspects of the present disclosure relate to the recombinant expression of genes encoding enzymes, functional modifications and variants thereof, as well as uses relating thereto. For example, the methods described in this application may be used to produce mogrol precursors, mogrol and/or mogrosides.

[0177] The term “heterologous” with respect to a polynucleotide, such as a polynucleotide comprising a gene, is used interchangeably with the term “exogenous” and the term “recombinant” and refers to: a polynucleotide that has been artificially supplied to a biological system; a polynucleotide that has been modified within a biological system, or a polynucleotide whose expression or regulation has been manipulated within a biological system. A heterologous polynucleotide that is introduced into or expressed in a host cell may be a polynucleotide that comes from a different organism or species from the host cell, or may be a synthetic polynucleotide, or may be a polynucleotide that is also endogenously expressed in the same organism or species as the host cell. For example, a polynucleotide that is endogenously expressed in a host cell may be considered heterologous when it is situated non-naturally in the host cell; expressed recombinantly in the host cell, either stably or transiently; modified within the host cell; selectively edited within the host cell; expressed in a copy number that differs from the naturally occurring copy number within the host cell; or expressed in a non-natural way within the host cell, such as by manipulating regulatory regions that control expression of the polynucleotide. In some embodiments, a heterologous polynucleotide is a polynucleotide that is endogenously expressed in a host cell but whose expression is driven by a promoter that does not naturally regulate expression of the polynucleotide. In other embodiments, a heterologous polynucleotide is a polynucleotide that is endogenously expressed in a host cell and whose expression is driven by a promoter that does naturally regulate expression of the polynucleotide, but the promoter or another regulatory region is modified. In some embodiments, the promoter is recombinantly activated or repressed. For example, gene-editing based techniques may be used to regulate expression of a polynucleotide, including an endogenous polynucleotide, from a promoter, including an endogenous promoter. See, e.g., Chavez et al., Nat Methods. 2016 Jul; 13(7): 563-567. A heterologous polynucleotide may comprise a wild-type sequence or a mutant sequence as compared with a reference polynucleotide sequence.

[0178] A nucleic acid encoding any of the recombinant polypeptides, such as CDSs, UGTs, C11 hydroxylases, cytochrome P450 reductases, EPHs, or SQEs, described in this application may be incorporated into any appropriate vector through any method known in the art. For example, the vector may be an expression vector, including but not limited to a viral vector (e.g., a lentiviral, retroviral, adenoviral, or adeno-associated viral vector), any vector suitable for transient expression, any vector suitable for constitutive expression, or any vector suitable for inducible expression (e.g., a galactose-inducible or doxycycline-inducible vector).

[0179] In some embodiments, a vector replicates autonomously in the cell. A vector can contain one or more endonuclease restriction sites that are cut by a restriction endonuclease to insert and ligate a nucleic acid containing a gene described in this application to produce a recombinant vector that is able to replicate in a cell. Vectors are typically composed of DNA, although RNA vectors are also available. Cloning vectors include, but are not limited to: plasmids, fosmids, phagemids, virus genomes and artificial chromosomes. As used in this application, the terms “expression vector” or “expression construct” refer to a nucleic acid construct, generated recombinantly or synthetically, with a series of specified nucleic acid elements that permit transcription of a particular nucleic acid in a host cell, such as a yeast cell. In some embodiments, the nucleic acid sequence of a gene described in this application is inserted into a cloning vector such that it is operably joined to regulatory sequences and, in some embodiments, expressed as an RNA transcript. In some embodiments, the vector contains one or more markers, such as a selectable marker as described in this application, to identify cells transformed or transfected with the recombinant vector. In some embodiments, the nucleic acid sequence of a gene described in this application is codon-optimized. Codon optimization may increase production of the gene product by at least 10%, at least 15%, at least 20%, at least 25%, at least 30%, at least 35%, at least 40%, at least 45%, at least 50%, at least 55%, at least 60%, at least 65%, at least 70%, at least 75%, at least 80%, at least 85%, at least 90%, at least 95%, or 100%, including all values in between) relative to a reference sequence that is not codon-optimized.

[0180] A coding sequence and a regulatory sequence are said to be “operably joined” or “operably linked” when the coding sequence and the regulatory sequence are covalently linked and the expression or transcription of the coding sequence is under the influence or control of the regulatory sequence. If the coding sequence is to be translated into a functional protein, the coding sequence and the regulatory sequence are said to be operably joined or linked if induction of a promoter in the 5′ regulatory sequence permits the coding sequence to be transcribed and if the nature of the linkage between the coding sequence and the regulatory sequence does not (1) result in the introduction of a frame-shift mutation, (2) interfere with the ability of the promoter region to direct the transcription of the coding sequence, or (3) interfere with the ability of the corresponding RNA transcript to be translated into a protein.

[0181] In some embodiments, the nucleic acid encoding any of the proteins described in this application is under the control of regulatory sequences (e.g., enhancer sequences). In some embodiments, a nucleic acid is expressed under the control of a promoter. The promoter can be a native promoter, e.g., the promoter of the gene in its endogenous context, which provides normal regulation of expression of the gene. Alternatively, a promoter can be a promoter that is different from the native promoter of the gene, e.g., the promoter is different from the promoter of the gene in its endogenous context.

[0182] In some embodiments, the promoter is a eukaryotic promoter. Non-limiting examples of eukaryotic promoters include TDH3, PGK1, PKC1, PDC1, TEF1, TEF2, RPL18B, SSA1, TDH2, PYK1,TPI1 GAL1, GAL10, GAL7, GAL3, GAL2, MET3, MET25, HXT3, HXT7, ACT1, ADH1, ADH2, CUP1-1, ENO2, and SOD1, as would be known to one of ordinary skill in the art (see, e.g., Addgene website: blog.addgene.org/plasmids-101-the-promoter-region). In some embodiments, the promoter is a prokaryotic promoter (e.g., bacteriophage or bacterial promoter). Non-limiting examples of bacteriophage promoters include Plslcon, T3, T7, SP6, and PL. Non-limiting examples of bacterial promoters include Pbad, PmgrB, Ptrc2, Plac/ara, Ptac, and Pm.

[0183] In some embodiments, the promoter is an inducible promoter. As used in this application, an “inducible promoter” is a promoter controlled by the presence or absence of a molecule. Non-limiting examples of inducible promoters include chemically-regulated promoters and physically-regulated promoters. For chemically-regulated promoters, the transcriptional activity can be regulated by one or more compounds, such as alcohol, tetracycline, galactose, a steroid, a metal, or other compounds. For physically-regulated promoters, transcriptional activity can be regulated by a phenomenon such as light or temperature. Non-limiting examples of tetracycline-regulated promoters include anhydrotetracycline (aTc)-responsive promoters and other tetracycline-responsive promoter systems (e.g., a tetracycline repressor protein (tetR), a tetracycline operator sequence (tetO) and a tetracycline transactivator fusion protein (tTA)). Non-limiting examples of steroid-regulated promoters include promoters based on the rat glucocorticoid receptor, human estrogen receptor, moth ecdysone receptors, and promoters from the steroid/retinoid/thyroid receptor superfamily. Non-limiting examples of metal-regulated promoters include promoters derived from metallothionein (proteins that bind and sequester metal ions) genes. Non-limiting examples of pathogenesis-regulated promoters include promoters induced by salicylic acid, ethylene or benzothiadiazole (BTH). Non-limiting examples of temperature/heat-inducible promoters include heat shock promoters. Non-limiting examples of light-regulated promoters include light responsive promoters from plant cells. In certain embodiments, the inducible promoter is a galactose-inducible promoter. In some embodiments, the inducible promoter is induced by one or more physiological conditions (e.g., pH, temperature, radiation, osmotic pressure, saline gradients, cell surface binding, or concentration of one or more extrinsic or intrinsic inducing agents). Non-limiting examples of an extrinsic inducer or inducing agent include amino acids and amino acid analogs, saccharides and polysaccharides, nucleic acids, protein transcriptional activators and repressors, cytokines, toxins, petroleum-based compounds, metal containing compounds, salts, ions, enzyme substrate analogs, hormones or any combination thereof.

[0184] In some embodiments, the promoter is a constitutive promoter. As used in this application, a “constitutive promoter” refers to an unregulated promoter that allows continuous transcription of a gene. Non-limiting examples of a constitutive promoter include TDH3, PGK1, PKC1, PDC1, TEF1, TEF2, RPL18B, SSA1, TDH2, PYK1,TPI1, HXT3, HXT7, ACT1, ADH1, ADH2, ENO2, and SOD1.

[0185] Other inducible promoters or constitutive promoters known to one of ordinary skill in the art are also contemplated.

[0186] The precise nature of the regulatory sequences needed for gene expression may vary between species or cell types, but generally include, as necessary, 5′ non-transcribed and 5′ non-translated sequences involved with the initiation of transcription and translation respectively, such as a TATA box, capping sequence, CAAT sequence, and the like. In particular, such 5′ non-transcribed regulatory sequences will include a promoter region which includes a promoter sequence for transcriptional control of the operably joined gene. Regulatory sequences may also include enhancer sequences or upstream activator sequences. The vectors disclosed in this application may include 5′ leader or signal sequences. The regulatory sequence may also include a terminator sequence. In some embodiments, a terminator sequence marks the end of a gene in DNA during transcription. The choice and design of one or more appropriate vectors suitable for inducing expression of one or more genes described in this application in a host cell is within the ability and discretion of one of ordinary skill in the art.

[0187] Expression vectors containing the necessary elements for expression are commercially available and known to one of ordinary skill in the art (see, e.g., Sambrook et al., Molecular Cloning: A Laboratory Manual, Fourth Edition, Cold Spring Harbor Laboratory Press, 2012).

[0188] In some embodiments, introduction of a polynucleotide, such as a polynucleotide encoding a recombinant polypeptide, into a host cell results in genomic integration of the polynucleotide. In some embodiments, a host cell comprises at least 1 copy, at least 2 copies, at least 3 copies, at least 4 copies, at least 5 copies, at least 6 copies, at least 7 copies, at least 8 copies, at least 9 copies, at least 10 copies, at least 11 copies, at least 12 copies, at least 13 copies, at least 14 copies, at least 15 copies, at least 16 copies, at least 17 copies, at least 18 copies, at least 19 copies, at least 20 copies, at least 21 copies, at least 22 copies, at least 23 copies, at least 24 copies, at least 25 copies, at least 26 copies, at least 27 copies, at least 28 copies, at least 29 copies, at least 30 copies, at least 31 copies, at least 32 copies, at least 33 copies, at least 34 copies, at least 35 copies, at least 36 copies, at least 37 copies, at least 38 copies, at least 39 copies, at least 40 copies, at least 41 copies, at least 42 copies, at least 43 copies, at least 44 copies, at least 45 copies, at least 46 copies, at least 47 copies, at least 48 copies, at least 49 copies, at least 50 copies, at least 60 copies, at least 70 copies, at least 80 copies, at least 90 copies, at least 100 copies, or more, including any values in between, of a polynucleotide sequence, such as a polynucleotide sequence encoding any of the recombinant polypeptides described in this application, in its genome.

### Host Cells

[0189] Any of the proteins or enzymes of the disclosure may be expressed in a host cell. As used in this application, the term “host cell” refers to a cell that can be used to express a polynucleotide, such as a polynucleotide that encodes an enzyme used in production of mogrol, mogrosides, and precursors thereof.

[0190] Any suitable host cell may be used to produce any of the recombinant polypeptides, including CDSs, UGTs, C11 hydroxylases, cytochrome P450 reductases, EPHs, and SQEs disclosed in this application, including eukaryotic cells or prokaryotic cells. Suitable host cells include, but are not limited to, fungal cells (e.g., yeast cells), bacterial cells (e.g., E. coli cells), algal cells, plant cells, insect cells, and animal cells, including mammalian cells.

[0191] Suitable yeast host cells include, but are not limited to: Candida, Hansenula, Saccharomyces, Schizosaccharomyces, Pichia, Kluyveromyces, and Yarrowia. In some embodiments, the yeast cell is Hansenula polymorpha, Saccharomyces cerevisiae, Saccaromyces carlsbergensis, Saccharomyces diastaticus, Saccharomyces norbensis, Saccharomyces kluyveri, Schizosaccharomyces pombe, Pichia finlandica, Pichia trehalophila, Pichia kodamae, Pichia membranaefaciens, Pichia opuntiae, Pichia pastoris, Pichia pseudopastoris, Pichia membranifaciens, Komagataella pseudopastoris, Komagataella pastoris, Komagataella kurtzmanii, Komagataella mondaviorum, Pichia thermotolerans, Pichia salictaria, Pichia quercuum, Pichia pijperi, Pichia stipitis, Pichia methanolica, Pichia angusta, Komagataella phaffii, Komagataella pastoris, Kluyveromyces lactis, Candida albicans, Candida boidinii or Yarrowia lipolyticaIn some embodiments, the yeast strain is an industrial polyploid yeast strain. Other non-limiting examples of fungal cells include cells obtained from Aspergillus spp., Penicillium spp., Fusarium spp., Rhizopus spp., Acremonium spp., Neurospora spp., Sordaria spp., Magnaporthe spp., Allomyces spp., Ustilago spp., Botrytis spp., and Trichoderma spp.

[0192] In certain embodiments, the host cell is an algal cell such as, Chlamydomonas (e.g., C. Reinhardtii) and Phormidium ( P. sp. ATCC29409).

[0193] In other embodiments, the host cell is a prokaryotic cell. Suitable prokaryotic cells include gram positive, gram negative, and gram-variable bacterial cells. The host cell may be a species of, but not limited to: Agrobacterium, Alicyclobacillus, Anabaena, Anacystis, Acinetobacter, Acidothermus, Arthrobacter, Azobacter, Bacillus, Bifidobacterium, Brevibacterium, Butyrivibrio, Buchnera, Campestris, Camplyobacter, Clostridium, Corynebacterium, Chromatium, Coprococcus, Escherichia, Enterococcus, Enterobacter, Erwinia, Fusobacterium, Faecalibacterium, Francisella, Flavobacterium, Geobacillus, Haemophilus, Helicobacter, Klebsiella, Lactobacillus, Lactococcus, Ilyobacter, Micrococcus, Microbacterium, Mesorhizobium, Methylobacterium, Methylobacterium, Mycobacterium, Neisseria, Pantoea, Pseudomonas, Prochlorococcus, Rhodobacter, Rhodopseudomonas, Rhodopseudomonas, Roseburia, Rhodospirillum, Rhodococcus, Scenedesmus, Streptomyces, Streptococcus, Synecoccus, Saccharomonospora,Saccharopolyspora, Staphylococcus, Serratia, Salmonella, Shigella, Thermoanaerobacterium, Tropheryma, Tularensis, Temecula, Thermosynechococcus, Thermococcus, Ureaplasma, Xanthomonas, Xylella, Yersinia, and Zymomonas.

[0194] In some embodiments, the bacterial host cell is of the Agrobacterium species (e.g., A. radiobacter, A. rhizogenes, A. rubi), the Arthrobacterspecies (e.g., A. aurescens, A. citreus, A. globformis, A. hydrocarboglutamicus, A. mysorens, A. nicotianae, A. paraffineus, A. protophonniae, A. roseoparaffinus, A. sulfureus, A. ureafaciens), or the Bacillus species (e.g., B. thuringiensis, B. anthracis, B. megaterium, B. subtilis, B. lentus, B. circulans, B. pumilus, B. lautus, B. coagulans, B. brevis, B. firmus, B. alkaophius, B. licheniformis, B. clausii, B. stearothermophilus, B. halodurans and B. amyloliquefaciens. In particular embodiments, the host cell is an industrial Bacillus strain including but not limited to B. subtilis, B. pumilus, B. licheniformis, B. megaterium, B. clausii, B. stearothermophilus and B. amyloliquefaciens. In some embodiments, the host cell is an industrial Clostridium species (e.g., C. acetobutylicum, C. tetani E88 , C. lituseburense, C. saccharobutylicum, C. perfringens, C. beijerinckii). In some embodiments, the host cell is an industrial Corynebacterium species (e.g., C. glutamicum, C. acetoacidophilum). In some embodiments, the host cell is an industrial Escherichia species (e.g., E. coli). In some embodiments, the host cell is an industrial Erwinia species (e.g., E. uredovora, E. carotovora, E. ananas, E. herbicola, E. punctata, E. terreus). In some embodiments, the host cell is an industrial Pantoea species (e.g., P. citrea, P. agglomerans). In some embodiments, the host cell is an industrial Pseudomonas species, (e.g., P. putida, P. aeruginosa, P. mevalonii). In some embodiments, the host cell is an industrial Streptococcus species (e.g., S. equisimiles, S. pyogenes, S. uberis). In some embodiments, the host cell is an industrial Streptomyces species (e.g., S. ambofaciens, S. achromogenes, S. avermitilis, S. coelicolor, S. aureofaciens, S. aureus, S. fungicidicus, S. griseus, S. lividans). In some embodiments, the host cell is an industrial Zymomonas species (e.g., Z. mobilis, Z. lipolytica).

[0195] The present disclosure is also suitable for use with a variety of animal cell types, including mammalian cells, for example, human (including 293, HeLa, WI38, PER.C6 and Bowes melanoma cells), mouse (including 3T3, NS0, NS1, Sp2/0), hamster (CHO, BHK), monkey (COS, FRhL, Vero), and hybridoma cell lines.

[0196] The present disclosure is also suitable for use with a variety of plant cell types.

[0197] The term “cell,” as used in this application, may refer to a single cell or a population of cells, such as a population of cells belonging to the same cell line or strain. Use of the singular term “cell” should not be construed to refer explicitly to a single cell rather than a population of cells.

[0198] The host cell may comprise genetic modifications relative to a wild-type counterpart. As a non-limiting example, a host cell (e.g., S. cerevisiae) may be modified to reduce or inactivate one or more of the following genes: hydroxymethylglutaryl-CoA (HMG-CoA) reductase (HMG1), acetyl-CoA C-acetyltransferase (acetoacetyl-CoA thiolase) (ERG10), 3-hydroxy-3-methylglutaryl-CoA (HMG-CoA) synthase (ERG13), farnesyl-diphosphate farnesyl transferase (squalene synthase) (ERG9), may be modified to overexpress squalene epoxidase (ERG1), or may be modified to downregulate lanosterol synthase (ERG7). In some embodiments, a host cell is modified to reduce or eliminate expression of one or more transporter genes, such as PDR1 or PDR3, and/or the glucanase gene EXG1.

[0199] In some embodiments, a host cell is modified to reduce or inactivate at least 1, at least 2, at least 3, at least 4, at least 5, at least 6, at least 7, at least 8, at least 9, at least 10, at least 11, at least 12, at least 13, at least 14, at least 15, at least 16, at least 17, at least 18, at least 19, or at least 20 genes.

[0200] In some embodiments, a host cell is modified to reduce or inactivate 1, 2, 3, 4, 5, 6, 7, 8, 9, 10, 11, 12, 13, 14, 15, 16, 17, 18, 19, or 20 genes.

[0201] Reduction of gene expression and/or gene inactivation may be achieved through any suitable method, including but not limited to deletion of the gene, introduction of a point mutation into the gene, truncation of the gene, introduction of an insertion into the gene, introduction of a tag or fusion into the gene, or selective editing of the gene. For example, polymerase chain reaction (PCR)-based methods may be used (see, e.g., Gardner et al., Methods Mol Biol. 2014;1205:45-78) or well-known gene-editing techniques may be used. As a non-limiting example, genes may be deleted through gene replacement (e.g., with a marker, including a selection marker). A gene may also be truncated through the use of a transposon system (see, e.g., Poussu et al., Nucleic Acids Res. 2005; 33(12): e104).

[0202] A vector encoding any of the recombinant polypeptides described in this application may be introduced into a suitable host cell using any method known in the art. Non-limiting examples of yeast transformation protocols are described in Gietz et al., Yeast transformation can be conducted by the LiAc/SS Carrier DNA/PEG method. Methods Mol Biol. 2006;313:107-20, which is incorporated by reference in its entirety. Host cells may be cultured under any suitable conditions as would be understood by one of ordinary skill in the art. For example, any media, temperature, and incubation conditions known in the art may be used. For host cells carrying an inducible vector, cells may be cultured with an appropriate inducible agent to promote expression.

[0203] Any of the cells disclosed in this application can be cultured in media of any type (rich or minimal) and any composition prior to, during, and/or after contact and/or integration of a nucleic acid. The conditions of the culture or culturing process can be optimized through routine experimentation as would be understood by one of ordinary skill in the art. In some embodiments, the selected media is supplemented with various components. In some embodiments, the concentration and amount of a supplemental component is optimized. In some embodiments, other aspects of the media and growth conditions (e.g., pH, temperature, etc.) are optimized through routine experimentation. In some embodiments, the frequency that the media is supplemented with one or more supplemental components, and the amount of time that the cell is cultured, is optimized.

[0204] Culturing of the cells described in this application can be performed in culture vessels known and used in the art. In some embodiments, an aerated reaction vessel (e.g., a stirred tank reactor) is used to culture the cells. In some embodiments, a bioreactor or fermentor is used to culture the cell. Thus, in some embodiments, the cells are used in fermentation. As used in this application, the terms “bioreactor” and “fermentor” are interchangeably used and refer to an enclosure, or partial enclosure, in which a biological, biochemical and/or chemical reaction takes place, involving a living organism, part of a living organism, or purified enzymes. A “large-scale bioreactor” or “industrial-scale bioreactor” is a bioreactor that is used to generate a product on a commercial or quasi-commercial scale. Large scale bioreactors typically have volumes in the range of liters, hundreds of liters, thousands of liters, or more.

[0205] Non-limiting examples of bioreactors include: stirred tank fermentors, bioreactors agitated by rotating mixing devices, chemostats, bioreactors agitated by shaking devices, airlift fermentors, packed-bed reactors, fixed-bed reactors, fluidized bed bioreactors, bioreactors employing wave induced agitation, centrifugal bioreactors, roller bottles, and hollow fiber bioreactors, roller apparatuses (for example benchtop, cart-mounted, and/or automated varieties), vertically-stacked plates, spinner flasks, stirring or rocking flasks, shaken multi-well plates, MD bottles, T-flasks, Roux bottles, multiple-surface tissue culture propagators, modified fermentors, and coated beads (e.g., beads coated with serum proteins, nitrocellulose, or carboxymethyl cellulose to prevent cell attachment).

[0206] In some embodiments, the bioreactor includes a cell culture system where the cell (e.g., yeast cell) is in contact with moving liquids and/or gas bubbles. In some embodiments, the cell or cell culture is grown in suspension. In other embodiments, the cell or cell culture is attached to a solid phase carrier. Non-limiting examples of a carrier system includes microcarriers (e.g., polymer spheres, microbeads, and microdisks that can be porous or nonporous), cross-linked beads (e.g., dextran) charged with specific chemical groups (e.g., tertiary amine groups), 2D microcarriers including cells trapped in nonporous polymer fibers, 3D carriers (e.g., carrier fibers, hollow fibers, multicartridge reactors, and semi-permeable membranes that can comprising porous fibers), microcarriers having reduced ion exchange capacity, encapsulation cells, capillaries, and aggregates. In some embodiments, carriers are fabricated from materials such as dextran, gelatin, glass, or cellulose.

[0207] In some embodiments, industrial-scale processes are operated in continuous, semi-continuous or non-continuous modes. Non-limiting examples of operation modes are batch, fed batch, extended batch, repetitive batch, draw/fill, rotating-wall, spinning flask, and/or perfusion mode of operation. In some embodiments, a bioreactor allows continuous or semi-continuous replenishment of the substrate stock, for example a carbohydrate source and/or continuous or semi-continuous separation of the product, from the bioreactor.

[0208] In some embodiments, the bioreactor or fermentor includes a sensor and/or a control system to measure and/or adjust reaction parameters. Non-limiting examples of reaction parameters include biological parameters (e.g., growth rate, cell size, cell number, cell density, cell type, or cell state, etc.), chemical parameters (e.g., pH, redox-potential, concentration of reaction substrate and/or product, concentration of dissolved gases, such as oxygen concentration and CO₂ concentration, nutrient concentrations, metabolite concentrations, concentration of an oligopeptide, concentration of an amino acid, concentration of a vitamin, concentration of a hormone, concentration of an additive, serum concentration, ionic strength, concentration of an ion, relative humidity, molarity, osmolarity, concentration of other chemicals, for example buffering agents, adjuvants, or reaction byproducts), physical/mechanical parameters (e.g., density, conductivity, degree of agitation, pressure, and flow rate, shear stress, shear rate, viscosity, color, turbidity, light absorption, mixing rate, conversion rate, as well as thermodynamic parameters, such as temperature, light intensity/quality, etc.). Sensors to measure the parameters described in this application are well known to one of ordinary skill in the relevant mechanical and electronic arts. Control systems to adjust the parameters in a bioreactor based on the inputs from a sensor described in this application are well known to one of ordinary skill in the art in bioreactor engineering.

[0209] In some embodiments, the method involves batch fermentation (e.g., shake flask fermentation). General considerations for batch fermentation (e.g., shake flask fermentation) include the level of oxygen and glucose. For example, batch fermentation (e.g., shake flask fermentation) may be oxygen and glucose limited, so in some embodiments, the capability of a strain to perform in a well-designed fed-batch fermentation is underestimated. Also, the final product (e.g., mogrol precursor, mogrol, mogroside precursor, or mogroside) may display some differences from the substrate (e.g., mogrol precursor, mogrol, mogroside precursor, or mogroside) in terms of solubility, toxicity, cellular accumulation and secretion and in some embodiments can have different fermentation kinetics.

[0210] The methods described in this application encompass production of the mogrol precursors (e.g., squalene, 2,3-oxidosqualene, or 24-25 epoxy-cucurbitadienol), mogrol, or mogrosides (e.g., MIA1, MIE1, MIIA1, MIIA2, MIIIA1, MIIE1, MIII, siamenoside I, mogroside IV, isomogroside IV, MIIIE, and mogroside V) using a recombinant cell, cell lysate or isolated recombinant polypeptides (e.g., CDS, UGT, C11 hydroxylase, cytochrome P450 reductase, EPH, and squalene epoxidase).

[0211] Mogrol precursors (e.g., squalene, 2,3-oxidosqualene, or 24-25 epoxy-cucurbitadienol), mogrol, mogrosides (e.g., MIA1, MIE, MIIA1, MIIA2, MIIIA1, MIIE1, MIII, siamenoside I, mogroside IV, isomogroside IV, MIIIE, and mogroside V) produced by any of the recombinant cells disclosed in this application may be identified and extracted using any method known in the art. Mass spectrometry (e.g., LC-MS, GC-MS) is a non-limiting example of a method for identification and may be used to help extract a compound of interest.

[0212] The phraseology and terminology used in this application is for the purpose of description and should not be regarded as limiting. The use of terms such as “including,” “comprising,” “having,” “containing,” “involving,” and/or variations thereof in this application, is meant to encompass the items listed thereafter and equivalents thereof as well as additional items.

[0213] The present invention is further illustrated by the following Examples, which in no way should be construed as further limiting. The entire contents of all of the references (including literature references, issued patents, published patent applications, and co pending patent applications) cited throughout this application are hereby expressly incorporated by reference.

### EXAMPLES

### Example 1. Identification and Functional Characterization of Putative UGT Enzymes With Primary Glycosylation Activity

[0214] This Example describes the screening of a UGT library to identify UGTs capable of converting mogrol and mogroside precursors into glycosylated mogrosides. Specifically, the library aimed to identify UGTs with primary glycoslyation activity that glycosylate at the C3 and C24 hydroxyl groups of mogrol to yield mogrosides with different glucose units. The library included approximately 2152 putative UGTs that were obtained from both plant and non-plant sources. The entire library was screened for primary glycosylation activity.

[0215] To test the UGT library for primary glycosylation activity, an in vivo plate assay combined with analysis by LC-MS was utilized. Plasmids carrying individual UGTs were transformed and integrated into the chromosome of a S. cerevisiae chassis strain that produces a mogrol precursor. A strain expressing a UGT that forms single glycosylation products was used as a positive control, and a strain expressing GFP was used as a negative control.

[0216] Single colonies resulting from transformation were grown as pre-cultures containing culturing media in a shaking incubator at 30° C. for 48 hours at 1000 rpm. After 48 hours, pre-cultures were transferred into production media and grown in a shaking incubator at 30° C. for 96 hours at 1000 rpm. After 96 hours, cultures were extracted with an organic solvent and product formation was tested by LC-MS analysis to evaluate mogroside production. A thermo QQQ TSQ-Quantiva ESI with a LX4 multiplexed columns setup was used. A C18 column (Accucore 100 ×2.1 mm) with a 0.1% formic acid in water running buffer and acetonitrile ramp were used for separation in negative mode using SIM.

[0217] Initially, a short analytical run was performed to identify product species based on mass. Based on this screen, 250 candidate UGTs were identified that demonstrated primary glycosylation activity.

[0218] A subset of candidate UGTs was selected based on their mogrol conversion activities. These UGTs were subjected to follow-up analysis with a longer analytical run to characterize the mogroside products as MIA1 (C24 glycosylation) MIE1 (C3 glycosylation) or MIIE (C24 and C3 glycosylation).

[0219] FIGS. 2 and 3 demonstrate results from the primary glycosylation UGT library screen. FIG. 2 shows results from the longer analytical run carried out on the subset of candidate UGTs described above to characterize the mogroside products identified. FIG. 3 depicts the UGT candidates from FIG. 2 that demonstrated considerable glycosylation activity. FIG. 3A demonstrates candidates with MIA1 (C24 glycosylation) activity, FIG. 3B demonstrates candidates with MIE1 (C3 glycosylation) and FIG. 3C demonstrates candidate with MIIE1 (C3 and C24 glycosylation) activity. These data are also summarized in Table 3. As a non-limiting example, Table 3 shows that Sample ID 24128597 comprising UGT ID/UGT protein m3954168 (SEQ ID NO: 78) demonstrated UGT primary glycosylation activity of converting mogrol to mogrosides MIA1, MIE1, and MIIE1. This sample produced 9.44 mg/L MIA1; 0.62 mg/L MIE1; 0.78 mg/L MIIE1; and 0.13 mg/L Mogrol.

TABLE 3

Primary glycosylation by Candidate UGTs

| | Sample ID | UGT ID/ UGT protein SEQ ID NO: | Type | MIA1 (mg/L) | MIE1 (mg/L) | MIIE1 (mg/L) | Mogrol (mg/L) |
|---|---|---|---|---|---|---|---|
| MIA1 | 24128597 | m3954168 SEQ ID NO: 78 | Library | 9.44 | 0.62 | 0.78 | 0.13 |
| | 24128689 | m3954684 SEQ ID NO: 94 | Library | 9.64 | 0.08 | 5.88 | 0.09 |
| | 23958087 | m3710896 | Library | 14.9 | 0 | 0.02 | 0.13 |
| | 23956230 | m3953983 SEQ ID NO: 76 | Library | 22.08 | 0.04 | 0.52 | 0.1 |
| | 23959878 | m3954531 SEQ ID NO: 88 | Library | 10.59 | 0.01 | 0 | 0.11 |
| | 24128970 | m3954606 SEQ ID NO: 89 | Library | 6.67 | 0 | 0 | 0.07 |
| | 24129351 | m3954350 SEQ ID NO: 86 | Library | 6.25 | 0 | 0.01 | 0.08 |
| | 24128678 | m3954761 SEQ ID NO: 97 | Library | 12.59 | 0 | 0 | 0.06 |
| | 24128774 | m3954639 SEQ ID NO: 92 | Library | 13.04 | 0.08 | 0.07 | 1.08 |
| | 23957806 | m3710904 SEQ ID NO: 66 | Library | 11.08 | 0.01 | 0 | 0.13 |
| | 24129435 | m3954307 SEQ ID NO: 84 | Library | 10.32 | 1.96 | 3.02 | 0 |
| | 23955237 | m3953464 SEQ ID NO: 69 | Library | 14.42 | 0 | 0.35 | 0.62 |
| | 24129338 | m3954267 | Library | 12.38 | 0.12 | 0.1 | 0.32 |
| | 24129142 | m3953871 SEQ ID NO: 73 | Library | 22.22 | 0 | 0 | 0.08 |
| | 23957988 | m3954751 SEQ ID NO: 96 | Library | 23.37 | 0.01 | 0.04 | 0.21 |
| | 24128646 | m3954669 SEQ ID NO: 93 | Library | 12.35 | 0.17 | 0.86 | 3.5 |
| | 23957459 | m3955387 SEQ ID NO: 101 | Library | 33.56 | 0 | 0.04 | 0.21 |
| | 23958227 | m3953189 SEQ 67NO: | Library | 21.71 | 1.82 | 0.24 | 1.32 |
| | 23955779 | m3954308 SEQ ID NO: 85 | Library | 56.79 | 0 | 0 | 0.34 |
| | 23958026 | m3954637 | Library | 45.81 | 0.03 | 0.05 | 4.46 |
| | | SEQ ID NO: 91 | | | | | |
| | 24129006 | m3710903 SEQ ID NO: 65 | Library | 7.18 | 0 | 0 | 0.36 |
| | 24130828 | m3953734 SEQ ID NO: 72 | Library | 5.33 | 0.75 | 0.95 | 2.66 |
| | 24128619 | m3953944 SEQ ID NO: 75 | Library | 8.05 | 0.04 | 0.1 | 0.32 |
| | 23955329 | m3953567 SEQ ID NO: 70 | Library | 7.99 | 0.02 | 0.18 | 11.22 |
| | 23955609 | m3953702 SEQ ID NO: 71 | Library | 62.84 | 0.02 | 0.36 | 0.43 |
| | 23958297 | m3953262 SEQ ID NO: 68 | Library | 13.99 | 0 | 0 | 0.12 |
| | 23959737 | m3710903 SEQ ID NO: 65 | Library | 4.82 | 0 | 0 | 0.4 |
| | 24130921 | m3954997 SEQ ID NO: 98 | Library | 10.54 | 0.02 | 0.17 | 1.09 |
| | 23957985 | m3954742 SEQ ID NO: 95 | Library | 12.38 | 0.02 | 0.03 | 0.18 |
| | 24129279 | m3954259 SEQ ID NO: 81 | Library | 9.92 | 0 | 0 | 0.27 |
| | 23955696 | m3955013 SEQ ID NO: 99 | Library | 38.75 | 0.01 | 0 | 3.42 |
| | 24128700 | m3954742 SEQ ID NO: 95 | Library | 10.66 | 0 | 0 | 0.21 |
| | 24128899 | m3954610 SEQ ID NO: 90 | Library | 5.17 | 0 | 0 | 5.1 |
| | 24131011 | m3955034 | Library | 13.4 | 0.15 | 0.04 | 2.1 |
| | | SEQ ID NO: 100 | | | | | |
| | 23955776 | m3954283 SEQ ID NO: 83 | Library | 8.04 | 0 | 0 | 0.07 |
| MIE1 | 23957941 | m3955517 SEQ ID NO: 102 | Library | 0.02 | 4.16 | 0.05 | 0.19 |
| | 24128930 | m3710890 SEQ ID NO: 63 | Library | 0 | 17.96 | 1.53 | 0.01 |
| | 23958091 | m3710885 SEQ ID NO: 62 | Library | 0.08 | 28.79 | 0.03 | 0.06 |
| | 23959874 | m3954446 SEQ ID NO: 87 | Library | 0.02 | 5.47 | 0.02 | 1.29 |
| | 24130651 | m3954254 | Library | 0.06 | 8.34 | 0.02 | 0.01 |
| | 24129100 | m3955521 SEQ ID NO: 103 | Library | 0 | 6.4 | 0 | 0.17 |
| | 24130639 | m3954239 SEQ ID NO: 79 | Library | 0.01 | 4.96 | 0 | 1.57 |
| | 23956161 | m3953937 SEQ ID NO: 74 | Library | 0.55 | 12.61 | 0.09 | 6.28 |
| MIIE1 | 24128689 | m3954684 SEQ ID NO: 94 | Library | 9.64 | 0.08 | 5.88 | 0.09 |
| | 24129435 | m3954307 SEQ ID NO: 84 | Library | 10.32 | 1.96 | 3.02 | 0 |
| | 23959819 | m3710890 SEQ ID NO: 63 | Library | 0 | 5.44 | 3.57 | 0.17 |
| | 24129191 | m3954005 SEQ ID NO: 77 | Library | 4.2 | 4.56 | 25.68 | 0.22 |
| Control | 23955762 | m3778973 SEQ ID NO: 117 | Negative Control | 0.02 | 0.01 | 0 | 24.85 |
| | 23956146 | m3778973 SEQ ID NO: 117 | Negative Control | 0.07 | 0 | 0 | 17.12 |
| | 24129380 | m3778975 | Positive control | 11.48 | 0.63 | 1.29 | 0.08 |
| | 24129092 | m3778975 | Positive control | 11.87 | 0.65 | 1.45 | 0.21 |

### Example 2. Identification and Functional Characterization of Putative UGT Enzymes With Secondary Glycosylation Activity

[0220] This Example describes the identification of UGTs with secondary glycosylation activity. A library of approximately 880 candidate UGTs was generated. The candidate UGTs within this library corresponded to candidate UGTs within the library described in Example 1 that were obtained from plant sources.

[0221] To test the UGT library for secondary glycosylation activity, an in vivo plate assay combined with analysis by LC-MS was utilized. Plasmids carrying individual UGTs were transformed and integrated into the chromosome of a chassis strain that produces primary mogrosides. A strain expressing a UGT that forms double glycosylated products was used as a positive control, and a strain expressing GFP was used as a negative control.

[0222] Single colonies resulting from transformation were grown as pre-cultures containing culturing media in a shaking incubator at 30° C. for 48 hours at 1000 rpm. After 48 hours, pre-cultures were transferred into production media and grown in a shaking incubator at 30° C. for 96 hours at 1000 rpm. After 96 hours, cultures were extracted with an organic solvent and product formation was tested by LC-MS analysis to evaluate mogroside production. A thermo QQQ TSQ-Quantiva ESI with a LX4 multiplexed columns setup was used. A C18 column (Accucore 100 ×2.1 mm) with a 0.1% formic acid in water running buffer and acetonitrile ramp were used for separation in negative mode using SIM. Initially, analysis was performed to identify product species based on mass. Based on this screen, two candidate UGTs (sample s23953261, expressing a candidate UGT corresponding to SEQ ID NO: 104 and sample s23953509, expressing a candidate UGT corresponding to SEQ ID NO: 105) were identified that demonstrated secondary glycosylation activity, including production of MIIIs, MIVs and MVs.

[0223] Follow-up analysis with a longer analytical run was performed on these two candidate UGTs to characterize the mogroside products. Surprisingly, sample s23953509 (expressing SEQ ID NO: 105) demonstrated production of MIVA but not other types of MIVs and also did not produce substantial amounts of MV products, indicating very specific 1-6 glycosylation activity. Sample s23953261 (expressing SEQ ID NO: 104) demonstrated production of MIII and MIV products that differed from the standards.

[0224] FIG. 4 and Table 4 depict mogroside production profiles from the two candidate UGTs identified. NPA indicates normalized peak area, which is calculated as the area under the curve based on LC/MS data and normalized to an internal analytical standard. The amount of mogrol (M), MIs, MIIs, MIIIs, MIVs, and MVs produced by strains carrying each of the 2 candidate UGTs were compared to the positive control strain. The fraction of MIs, MIIs, MIIIs, MIVs, and MVs corresponds to the amount of each relative to the total amount of product produced. As a non-limiting example, in Table 4, Sample ID s23953261 comprising UGT ID/UGT protein m3953578 (SEQ ID NO: 104) demonstrated secondary glycosylation activity of catalyzing the addition of a glycosyl group to a position on a compound that already comprises a glycosyl group. Sample ID s23953261 produced MIIIs, MIVs, and MVs; in particular, this sample produced: M (NPA): 0; MI (NPA): 1.76; MII (NPA): 0.91; MIII (NPA): 0.62; MIV (NPA): 0.52; and MV (NPA): 0.23.

TABLE 4

Secondary Glycosylation Activity Data from UGT Library

| Sample ID | UGT ID/ UGT protein SEQ ID NO | Type | M (NPA) | MI (NPA) | MII (NPA) | MIII (NPA) | MIV (NPA) | MV (NPA) |
|---|---|---|---|---|---|---|---|---|
| s23953261 | m3953578 SEQ ID NO: 104 | Library | 0 | 1.76 | 0.91 | 0.62 | 0.52 | 0.23 |
| s23953509 | m3953963 SEQ ID NO: 105 | Library | 0 | 0.64 | 1.86 | 2.05 | 3.55 | 0.17 |
| s24129705 | m3778973 SEQ ID NO: 117 | Negative Control | 0.01 | 6.44 | 0.21 | 0 | 0 | 0 |
| s24129477 | m3778974 | Positive Control | 0 | 0.69 | 0.11 | 0.19 | 0.39 | 0.09 |

### Example 3. Further Identification and Functional Characterization of Candidate UGT Enzymes With Secondary Glycosylation Activity

[0225] This Example describes the design and screening of an additional UGT library to identify additional UGTs with secondary glycoslyation activity. The UGT library consisted of approximately 163 candidate UGTs.

[0226] To test the UGT library for secondary glycosylation activity, an in vivo plate assay combined with analysis by LC-MS was utilized. Plasmids carrying UGTs were transformed into a chassis strain that expressed all of the enzymes required to make mogrol as well as two primary UGTs for production of primary mogrosides. The UGT library was screened in biological duplicates and evaluated initially using the same short analytical method as described in Examples 1 and 2.

[0227] Selected candidate UGTs were chosen for additional analysis using the longer analytical method, as described in Examples 1 and 2, to further characterize their activity through the identification of mogroside products. These candidate UGTs were run in four biological replicates and results were compared with a negative control expressing GFP, and a positive control secondary UGT.

[0228] Based on this screen, 9 candidate UGTs were identified that demonstrated secondary glycosylation activity and could produce mogroside products, including MIIIs, MIVs, and MVs. The percentages of mogrol, MIs, MIIs, MIIIs, MIVs, and MVs produced by these strains are shown in Table 5 and FIG. 5. As a non-limiting example, in Table 5, Sample ID s19740672 comprising UGT ID/UGT protein m2502914 (SEQ ID NO: 111) produced: M%: 0.00%; MI%: 16.55%; MII%: 65.22%; MIII%: 10.42%; MIV%: 7.81%; and MV%: 0.00%.

TABLE 5

Secondary Glycosylation Activity by Candidate UGTs

| Sample ID | UGT ID/ UGT protein SEQ ID NO | Type | M% | MI% | MII % | MIII% | MIV% | MV% |
|---|---|---|---|---|---|---|---|---|
| s19740672 | m2502914 SEQ ID NO: 111 | Library | 0.00% | 16.55% | 65.22% | 10.42% | 7.81% | 0.00% |
| s19740675 | m2502880 SEQ ID NO: 109 | Library | 0.00% | 20.30% | 67.76% | 11.95% | 0.00% | 0.00% |
| s19740692 | m2502896 SEQ ID NO: 110 | Library | 0.00% | 16.70% | 56.01% | 9.57% | 17.72% | 0.00% |
| s19740695 | m2503038 SEQ ID NO: 113 | Library | 0.00% | 14.87% | 55.70% | 23.73% | 5.70% | 0.00% |
| s19740739 | m2502872 SEQ ID NO: 108 | Library | 0.00% | 20.49% | 63.88% | 8.82% | 5.21% | 1.60% |
| s19740756 | m2502772 SEQ ID NO: 106 | Library | 0.00% | 13.87% | 58.08% | 26.45% | 1.60% | 0.00% |
| s19740799 | m2502788 | Library | 0.00% | 6.16% | 18.74% | 8.30% | 0.00% | 66.80% |
| s19740815 | m2503014 SEQ ID NO: 112 | Library | 0.00% | 14.40% | 56.89% | 9.87% | 18.84% | 0.00% |
| s19741001 | m2503040 SEQ ID NO: 114 | Library | 0.00% | 8.29% | 18.56% | 43.77% | 28.76% | 0.61% |
| s21014696 | m69976 | Negative Control | 0.00% | 23.72% | 61.89% | 14.39% | 0.00% | 0.00% |
| s21014698 | m1385369 | Positive Control | 0.00% | 4.27% | 6.65% | 18.06% | 22.68% | 48.34% |

### Example 4: Bioinformatic Analysis of UGTs

[0229] This Example describes bioinformatic analysis conducted on UGTs, including candidate UGTs identified in Examples 1-3. UGTs were clustered by MIA1, MIE1, and MIIE1 activity (FIG. 6). UGTs were also clustered by the Kingdom of Life origin classification. (FIG. 7). PhyML was used to analyze the phylogeny. FigTree was used to generate the schematic.

[0230] The putative structures of several UGTs that were capable of primary glycosylation were also analyzed. As shown in FIG. 8, m3710903 (SEQ ID NO: 65), m3953944 (SEQ ID NO: 75), m3710885 (SEQ ID NO: 62), and m3954606 (SEQ ID NO: 89) differed structurally relative to a reference UGT (FIG. 8). For example, rectangles highlight structural motifs (e.g., Loop 6, Alpha Helix 3, Alpha Helix 5, Loop 11, Alpha Helix 6, Loop 12 from Table 1) that differ between each candidate UGT and the reference UGT. The circles highlight sequence insertions.

### Example 5: Validation of Primary UGT Enzyme Hits From the Initial Glycosylation Activity Screen Described in Example 1

[0231] This example describes a follow up screen for the lead UGTs identified during a primary in vivo homologue screen. The purpose of this screen was to confirm whether the lead UGTs glycosylate at the C3 and C24 hydroxyl groups of mogrol to yield mogrosides with different glucose units that range from single glycosylated mogrosides up through penta-glycosylated mogrosides. This screen increased replication and additionally tested the lead enzymes identified during the initial UGT screen in the presence of secondary UGT activity. In this screen, lead primary UGT enzymes were inserted into the screening strain from Example 1, which also expressed the secondary UGT, UGT94-289-1. A total of 31 UGTs were screened in this experiment in triplicate.

[0232] To test the UGT homologues for primary glycosylation activity, an in vivo plate assay combined with analysis by LC-MS was utilized. Plasmids carrying individual UGTs were transformed and integrated into the chromosome of a S. cerevisiae chassis strain that produces a mogrol precursor. Two mogrol production strains with different titers, and parent chassis lacking any primary UGT insertions were included as negative controls. A siamenoside I production strain was included as a positive control.

[0233] Three single colonies resulting from transformation were grown as pre-cultures containing culturing media in a shaking incubator at 30° C. for 48 hours at 1,000 rpm. After 48 hours, precultures were transferred into production media and grown in a shaking incubator at 30° C. for 96 hours at 1,000 rpm. After 96 hours, cultures were extracted with an organic solvent and tested by LC-MS analysis to evaluate mogroside production.

[0234] To quantify the various mogrosides, a thermo QE-Focus ESI with a LX2 multiplexed column setup was used. A PFP column (Accucore 150 ×2.1 mm) with 12.5 mM ammonium acetate (pH 8) and acetonitrile ramp were used for separation of the individual mogroside products for the secondary 14 min/sample analysis. The QE Focus was run using full scan (range from 133.4 mz - 2000 mz) and resolution of 70,000 in negative mode.

[0235] As shown in Table 6 below and in FIG. 9A, numerous UGTs showed primary UGT activity and demonstrated MIA1 production. These primary UGTs could also be used in the production of other products, including MIIA1, MIIE1, MIII, MIIIA1, MIIIA2, MIIIE, siamenoside I, and MV as shown in Table 7 and FIG. 9B. In Tables 6-7, the mogrol strain was engineered to express one or more copies of CYP1798, CYP5491, AtCPR1, CPR4497, SgCDS, EPH3, and AtEPH2, as well as to upregulate expression of ERG9 and ERG1 and downregulate expression of ERG7. The mogrol strain was used as the host cell base strain. A different UGT was added to each parent strain. One parent strain comprised SEQ ID NO: 121 and another parent strain comprised SEQ ID NO: 63.

TABLE 6

Primary glycosylation by candidate UGTs

| Strain ID | UGT ID/ UGT protein (SEQ ID NO) | MIA1 [mg/L] | MIE1 [mg/L] | MIIA1 [mg/L] | Mogrol [mg/L] |
|---|---|---|---|---|---|
| 859181 | m3955387 (SEQ ID NO: 101) | 18.71 | 0.02 | 5.50 | 0.07 |
| 859163 | m3954606 (SEQ ID NO: 89) | 15.69 | 0.02 | 8.25 | 0.10 |
| 859185 | m3953702 (SEQ ID NO: 71) | 13.93 | 0.02 | 8.50 | 0.18 |
| 859161 | m3953871 (SEQ ID NO: 73) | 13.76 | 0.02 | 6.11 | 0.00 |
| 859180 | m3953983 (SEQ ID NO: 76) | 13.75 | 0.02 | 8.11 | 0.00 |
| 859172 | m3954761 (SEQ ID NO: 97) | 12.98 | 0.00 | 4.64 | 0.00 |
| 859160 | m3954531 (SEQ ID NO: 88) | 12.60 | 0.03 | 4.52 | 0.00 |
| 859190 | m3954308 (SEQ ID NO: 85) | 12.57 | 0.04 | 6.00 | 0.84 |
| 859170 | m3954742 (SEQ ID NO: 95) | 11.63 | 0.01 | 4.40 | 0.19 |
| 859171 | m3954751 (SEQ ID NO: 96) | 10.96 | 0.02 | 4.80 | 0.00 |
| 859187 | m3954350 (SEQ ID NO: 86) | 9.40 | 0.03 | 4.74 | 1.95 |
| 859167 | m3954639 (SEQ ID NO: 92) | 9.30 | 0.11 | 6.78 | 4.13 |
| 859184 | m3953464 (SEQ ID NO: 69) | 9.19 | 0.02 | 4.81 | 4.83 |
| 859166 | m3710904 (SEQ ID NO: 66) | 8.89 | 0.02 | 2.54 | 6.51 |
| 859186 | m3954168 (SEQ ID NO: 78) | 8.11 | 1.21 | 7.24 | 1.59 |
| 859173 | m3953944 (SEQ ID NO: 75) | 7.92 | 0.11 | 3.31 | 4.43 |
| 859177 | m3954997 (SEQ ID NO: 98) | 7.39 | 0.01 | 5.51 | 5.44 |
| 859162 | m3954610 (SEQ ID NO: 90) | 7.19 | 0.03 | 4.43 | 8.99 |
| 859174 | m3953189 (SEQ ID NO: 67) | 7.09 | 0.64 | 5.12 | 3.31 |
| 859169 | m3954637 (SEQ ID NO: 91) | 6.99 | 0.03 | 6.51 | 10.13 |
| 859168 | m3954669 (SEQ ID NO: 93) | 6.96 | 0.28 | 5.26 | 9.09 |
| 859165 | m3710903 (SEQ ID NO: 65) | 6.87 | 0.02 | 1.63 | 0.08 |
| 859178 | m3955013 (SEQ ID NO: 99) | 6.33 | 0.00 | 4.03 | 6.59 |
| 859175 | m3953262 (SEQ ID NO: 68) | 5.21 | 0.01 | 0.80 | 0.00 |
| 859176 | m3953567 (SEQ ID NO: 70) | 3.18 | 0.04 | 1.76 | 14.08 |
| 859179 | m3953734 (SEQ ID NO: 72) | 2.13 | 1.40 | 1.49 | 8.67 |
| 859189 | m3954259 (SEQ ID NO: 81) | 0.86 | 0.03 | 0.90 | 0.00 |
| 859188 | m3954283 (SEQ ID NO: 83) | 0.84 | 0.03 | 0.61 | 0.00 |
| 859183 | m3954307 (SEQ ID NO: 84) | 0.06 | 0.03 | 0.00 | 8.66 |
| 859196 | m3955521 (SEQ ID NO: 103) | 0.06 | 0.04 | 0.00 | 24.36 |
| 859194 | m3953937 (SEQ ID NO: 74) | 0.06 | 0.03 | 0.00 | 21.20 |
| 859198 | m3954239 (SEQ ID NO: 79) | 0.05 | 0.08 | 0.00 | 21.82 |
| 859195 | m3955517 (SEQ ID NO: 102) | 0.05 | 0.05 | 0.00 | 22.11 |
| 859193 | m3710885 (SEQ ID NO: 62) | 0.02 | 0.03 | 0.00 | 23.98 |
| 859191 | m3954446 (SEQ ID NO: 87) | 0.02 | 0.02 | 0.00 | 23.77 |
| 859192 | m3710890 (SEQ ID NO: 63) | 0.02 | 0.03 | 0.00 | 23.75 |
| 215398 | Control Gen5 | 0.02 | 0.03 | 0.02 | 4.08 |
| 669889 | Control lead mogrol strain | 0.02 | 0.02 | 0.02 | 16.04 |
| 703856 | Control lead siamenoside I | 0.43 | 0.69 | 0.34 | 0.02 |
| 859077 | Parent strain 1 | 0.00 | 0.00 | 0.03 | 21.76 |
| 859078 | Parent strain 2 | 0.14 | 0.01 | 0.08 | 9.27 |
| 859079 | Parent strain 3 | 0.00 | 0.02 | 0.00 | 21.04 |

TABLE 7

Production of additional products by candidate UGTs

| Strain ID | UGT ID/ UGT protein (SEQ ID NO) | MIIE1 [mg/L] | MIII [mg/L] | MIIIAI [mg/L] | MIIIA2 [mg/L] | MIIIE [mg/L] | Sia [mg/L] | MV [mg/L] |
|---|---|---|---|---|---|---|---|---|
| 859181 | m3955387 (SEQ ID NO: 101) | 0.00 | 0.00 | 0.13 | 0.00 | 0.00 | 0.00 | 0.00 |
| 859163 | m3954606 (SEQ ID NO: 89) | 0.00 | 0.00 | 0.34 | 0.00 | 0.00 | 0.00 | 0.00 |
| 859185 | m3953702 (SEQ ID NO: 71) | 0.00 | 0.00 | 0.40 | 0.00 | 0.00 | 0.00 | 0.00 |
| 859161 | m3953871 (SEQ ID NO: 73) | 0.00 | 0.00 | 0.21 | 0.00 | 0.05 | 0.00 | 0.00 |
| 859180 | m3953983 (SEQ ID NO: 76) | 0.10 | 0.43 | 0.29 | 0.44 | 0.32 | 0.29 | 0.33 |
| 859172 | m3954761 (SEQ ID NO: 97) | 0.00 | 0.00 | 0.21 | 0.00 | 0.00 | 0.00 | 0.00 |
| 859160 | m3954531 (SEQ ID NO: 88) | 0.00 | 0.00 | 0.22 | 0.00 | 0.00 | 0.00 | 0.00 |
| 859190 | m3954308 (SEQ ID NO: 85) | 0.00 | 0.00 | 0.30 | 0.00 | 0.00 | 0.00 | 0.00 |
| 859170 | m3954742 (SEQ ID NO: 95) | 0.00 | 0.00 | 0.21 | 0.00 | 0.00 | 0.00 | 0.00 |
| 859171 | m3954751 (SEQ ID NO: 96) | 0.00 | 0.00 | 0.21 | 0.00 | 0.00 | 0.00 | 0.00 |
| 859187 | m3954350 (SEQ ID NO: 86) | 0.00 | 0.00 | 0.25 | 0.03 | 0.04 | 0.00 | 0.00 |
| 859167 | m3954639 (SEQ ID NO: 92) | 0.00 | 0.04 | 0.37 | 0.00 | 0.05 | 0.00 | 0.00 |
| 859184 | m3953464 (SEQ ID NO: 69) | 0.00 | 0.00 | 0.18 | 0.00 | 0.00 | 0.00 | 0.00 |
| 859166 | m3710904 (SEQ ID NO: 66) | 0.00 | 0.00 | 0.18 | 0.00 | 0.00 | 0.00 | 0.00 |
| 859186 | m3954168 (SEQ ID NO: 78) | 0.09 | 0.04 | 0.59 | 0.04 | 0.10 | 0.05 | 0.00 |
| 859173 | m3953944 (SEQ ID NO: 75) | 0.00 | 0.00 | 0.20 | 0.00 | 0.00 | 0.00 | 0.00 |
| 859177 | m3954997 (SEQ ID NO: 98) | 0.00 | 0.00 | 0.31 | 0.00 | 0.00 | 0.00 | 0.00 |
| 859162 | m3954610 (SEQ ID NO: 90) | 0.00 | 0.00 | 0.25 | 0.00 | 0.00 | 0.00 | 0.00 |
| 859174 | m3953189 (SEQ ID NO: 67) | 0.03 | 0.09 | 0.21 | 0.00 | 0.00 | 0.00 | 0.07 |
| 859169 | m3954637 (SEQ ID NO: 91) | 0.00 | 0.00 | 0.45 | 0.00 | 0.00 | 0.00 | 0.00 |
| 859168 | m3954669 (SEQ ID NO: 93) | 0.00 | 0.04 | 0.36 | 0.03 | 0.04 | 0.00 | 0.00 |
| 859165 | m3710903 (SEQ ID NO: 65) | 0.00 | 0.00 | 0.08 | 0.00 | 0.00 | 0.00 | 0.00 |
| 859178 | m3955013 (SEQ ID NO: 99) | 0.02 | 0.00 | 0.26 | 0.00 | 0.00 | 0.00 | 0.00 |
| 859175 | m3953262 (SEQ ID NO: 68) | 0.00 | 0.00 | 0.00 | 0.00 | 0.00 | 0.00 | 0.00 |
| 859176 | m3953567 (SEQ ID NO: 70) | 0.00 | 0.00 | 0.16 | 0.00 | 0.00 | 0.00 | 0.00 |
| 859179 | m3953734 (SEQ ID NO: 72) | 0.09 | 0.14 | 0.16 | 0.00 | 0.05 | 0.00 | 0.00 |
| 859189 | m3954259 (SEQ ID NO: 81) | 0.00 | 0.00 | 0.39 | 0.00 | 0.00 | 0.00 | 0.16 |
| 859188 | m3954283 (SEQ ID NO: 83) | 0.00 | 0.00 | 0.42 | 0.00 | 0.00 | 0.00 | 0.09 |
| 859183 | m3954307 (SEQ ID NO: 84) | 0.00 | 0.00 | 0.00 | 0.00 | 0.00 | 0.00 | 0.00 |
| 859196 | m3955521 (SEQ ID NO: 103) | 0.00 | 0.00 | 0.00 | 0.00 | 0.00 | 0.00 | 0.00 |
| 859194 | m3953937 (SEQ ID NO: 74) | 0.00 | 0.00 | 0.00 | 0.04 | 0.04 | 0.00 | 0.00 |
| 859198 | m3954239 (SEQ ID NO: 79) | 0.00 | 0.00 | 0.00 | 0.00 | 0.00 | 0.00 | 0.00 |
| 859195 | m3955517 (SEQ ID NO: 102) | 0.00 | 0.00 | 0.00 | 0.00 | 0.00 | 0.00 | 0.00 |
| 859193 | m3710885 (SEQ ID NO: 62) | 0.00 | 0.00 | 0.00 | 0.00 | 0.00 | 0.00 | 0.00 |
| 859191 | m3954446 (SEQ ID NO: 87) | 0.00 | 0.00 | 0.00 | 0.00 | 0.00 | 0.00 | 0.00 |
| 859192 | m3710890 (SEQ ID NO: 63) | 0.00 | 0.00 | 0.00 | 0.00 | 0.00 | 0.00 | 0.00 |
| 215398 | Control Gen5 | 0.00 | 0.00 | 0.00 | 0.00 | 0.00 | 0.00 | 0.00 |
| 669889 | Control lead mogrol strain | 0.00 | 0.00 | 0.00 | 0.00 | 0.00 | 0.00 | 0.00 |
| 703856 | Control lead siamenoside I | 0.20 | 0.80 | 0.15 | 0.29 | 0.69 | 6.15 | 7.05 |
| 859077 | Parent strain 1 | 0.00 | 0.00 | 0.00 | 0.00 | 0.00 | 0.00 | 0.00 |
| 859078 | Parent strain 2 | 0.00 | 0.00 | 0.00 | 0.00 | 0.00 | 0.00 | 0.00 |
| 859079 | Parent strain 3 | 0.02 | 0.00 | 0.00 | 0.00 | 0.00 | 0.00 | 0.00 |

### Example 6: Combining Recombinant Proteins to Produce a Mogrol Precursor, Mogrol, or a Mogroside.

[0236] The recombinant proteins of the present disclosure are used in combination to produce a mogrol precursor, (e.g., 2-3-oxidosqualene, 2,3,22,23-dioxidosqualene, cucurbitadienol, 24, 25-expoxycucurbitadienol, 24,25-dihydroxycucurbitadienol), mogrol, or mogrosides (e.g., mogroside I-A1 (MIA1), mogroside I-E (MIE), mogroside II-A1 (MIIA1), mogroside III-A1 (MIIIA1), mogroside II-E (MIIE1), mogroside III (Mill), siamenoside I, mogroside IV, mogroside III-E (MIIIE), mogroside V, and mogroside VI).

[0237] For example, to produce mogrol, genes encoding enzymes such as an SQE, a CDS, an EPH and a C11 hydroxylase are expressed in yeast cells. In some instances, a cytochrome P450 reductase is also expressed in the yeast cells. Non-limiting examples of suitable SQEs, EPHs, C11 hydroxylases and cytochrome P450 reductases are provided in Tables 10-11. Non-limiting examples of CDSs are provided in Table 9. Mogrol can be quantified using LC-MS. UGTs are further expressed in the yeast cells to produce mogrosides. Non-limiting examples of UGTs are provided in Table 8.

[0238] Yarrowia cells may be used as the yeast cell. In some instances, Yarrowia cells comprising a squalene epoxidase, a CDS, a C11 hydroxylase, a secondary UGT, and a primary UGT comprising a sequence selected from the group consisting of SEQ ID NOs: 76, 101, 89, 71, 73, 97, 88, 85, 95, 96, 86, 92, 69, 66, 78, 75, 98, 90, 67, 91, 93, 65, 99, 68, 70, 72, 81, 83, 84, 103, 74, 79, 102, 62, and 87 are used to produce one or more mogrosides. In some instances, the squalene epoxidase is encoded by the ERG1 gene. In some instances, a Yarrowia cell further comprises a cytochrome P450 reductase (CPR), a cytochrome b5, another epoxidase and/or an epoxide hydrolase. In some instances, the other epoxidase is CYP1798.

[0239] Alternatively, the recombinant proteins are purified from host cells and the mogrol is produced outside of the host cells. The recombinant proteins are added either sequentially or simultaneously to a reaction buffer comprising squalene.

TABLE 8

Sequences of Candidate UGTs Associated with the Disclosure

| Sample ID | UGT ID/ UGT Name | Nucleotide Sequence SEQ ID NO: | Amino Acid Sequence SEQ ID NO: |
|---|---|---|---|
| s23958091 | m3710885 | 1 | 62 |
| s23959819 | m3710890 | 2 | 63 |
| s23959737 | m3710903 | 4 | 65 |
| s23957806 | m3710904 | 5 | 66 |
| s23958227 | m3953189 | 6 | 67 |
| s23958297 | m3953262 | 7 | 68 |
| s23955237 | m3953464 | 8 | 69 |
| s23955329 | m3953567 | 9 | 70 |
| s23955609 | m3953702 | 10 | 71 |
| s24130828 | m3953734 | 11 | 72 |
| s24129142 | m3953871 | 12 | 73 |
| s23956161 | m3953937 | 13 | 74 |
| s24128619 | m3953944 | 14 | 75 |
| s23956230 | m3953983 | 15 | 76 |
| s24129191 | m3954005 | 16 | 77 |
| s24128597 | m3954168 | 17 | 78 |
| s24130639 | m3954239 | 18 | 79 |
| s24129279 | m3954259 | 20 | 81 |
| s23955776 | m3954283 | 22 | 83 |
| s24129435 | m3954307 | 23 | 84 |
| s23955779 | m3954308 | 24 | 85 |
| s24129351 | m3954350 | 25 | 86 |
| s23959874 | m3954446 | 26 | 87 |
| s23959878 | m3954531 | 27 | 88 |
| s24128970 | m3954606 | 28 | 89 |
| s24128899 | m3954610 | 29 | 90 |
| s23958026 | m3954637 | 30 | 91 |
| s24128774 | m3954639 | 31 | 92 |
| s24128646 | m3954669 | 32 | 93 |
| s24128689 | m3954684 | 33 | 94 |
| s23957985 | m3954742 | 34 | 95 |
| s23957988 | m3954751 | 35 | 96 |
| s24128678 | m3954761 | 36 | 97 |
| s24130921 | m3954997 | 37 | 98 |
| s23955696 | m3955013 | 38 | 99 |
| s24131011 | m3955034 | 39 | 100 |
| s23957459 | m3955387 | 40 | 101 |
| s23957941 | m3955517 | 41 | 102 |
| s24129100 | m3955521 | 42 | 103 |
| s23953261 | m3953578 | 43 | 104 |
| s23953509 | m3953963 | 44 | 105 |
| s19740756 | m2502772 | 45 | 106 |
| s19740739 | m2502872 | 47 | 108 |
| s19740675 | m2502880 | 48 | 109 |
| s19740692 | m2502896 | 49 | 110 |
| s19740672 | m2502914 | 50 | 111 |
| s19740815 | m2503014 | 51 | 112 |
| s19740695 | m2503038 | 52 | 113 |
| s19741001 | m2503040 | 53 | 114 |
| s23955762 | m3778973 | 56 | 117 |
| s23956146 | | | |
| s24129705 | | | |
| 21014696 | 69976 | 57 | |

TABLE 9

Non-Limiting Examples of CDSs

| Name | Nucleotide Sequence SEQ ID NO: | Amino Acid Sequence SEQ ID NO: |
|---|---|---|
| A0A0K9RW03_m | 184 | 224 |
| AquAgaCDS1_m | 185 | 225 |
| AquAgaCDS16 | 186 | 226 |
| AquAgaCDS6 | 187 | 227 |
| BenHisCDS2_m | 188 | 228 |
| A0A0D3QY32 | 189 | 229 |
| A0A0D3QXV2 | 190 | 230 |
| CmaCh17G013880.1 | 191 | 231 |
| A0A1S3CBF6 | 192 | 232 |
| CocGraCDS4 | 193 | 233 |
| CocGraCDS6_m | 194 | 234 |
| CSPI06G07180.1 | 195 | 235 |
| CucFoeCDS | 196 | 236 |
| CucMelMakCDSS | 197 | 237 |
| CucMetCDS | 198 | 238 |
| CucPepOviCDS1_m | 199 | 239 |
| CucPepOviCDS2 | 200 | 240 |
| CucPepOviCDS3 | 201 | 241 |
| CucPepOviCDS3_m | 202 | 242 |
| Cucsa.349060.1 | 203 | 243 |
| F6GYI4 | 204 | 244 |
| GynCarCDS1 | 205 | 245 |
| GynCarCDS4 | 206 | 246 |
| K7NBZ9 | 207 | 247 |
| LagSicCDS2_m | 208 | 248 |
| Lus10014538.g_m | 209 | 249 |
| Lus10032146.g_m | 210 | 250 |
| MomChaCDS2 | 211 | 251 |
| MomChaCDS4 | 212 | 252 |
| O23909_PEA_Y118L | 213 | 253 |
| Q6BE24 | 214 | 254 |
| SecEduCDS | 215 | 255 |
| SgCDS1 | 216 | 256 |
| SgCDS_Scer1 | 217 | 257 |
| TriKirCDS10 | 218 | 258 |
| TriKirCDS4 | 219 | 259 |
| XP_006340479.1 | 220 | 260 |
| XP_008655662.1 | 221 | 261 |
| XP_010541955.1_m | 222 | 262 |
| XP_016688836.1_m | 223 | 263 |

TABLE 10

Non-Limiting Examples of C11 Hydroxylases (P450s), Cytochrome P450 Reductases, Epoxide Hydrolases (EPHs), and Squalene Epoxidases

| Enzyme | Nucleotide Sequence SEQ ID NO: | Amino Acid Sequence SEQ ID NO: |
|---|---|---|
| C11 hydroxylase | 264 | 280 |
| C11 hydroxylase (cucurbitadienol oxidase) | 265 | 281 |
| Cytochrome P450 reductase | 266 | 282 |
| Cytochrome P450 reductase | 267 | 283 |
| Epoxide hydrolase | 268 | 284 |
| Epoxide hydrolase | 269 | 285 |
| Epoxide hydrolase (epoxide hydratase) | 270 | 286 |
| Epoxide hydrolase (epoxide hydratase) | 271 | 287 |
| Epoxide hydrolase (epoxide hydratase) | 272 | 288 |
| Epoxide hydrolase (epoxide hydratase) | 273 | 289 |
| Epoxide hydrolase (epoxide hydratase) | 274 | 290 |
| Epoxide hydrolase (epoxide hydratase) | 275 | 291 |
| Epoxide hydrolase (epoxide hydratase) | 276 | 292 |
| Squalene epoxidase | 277 | 293 |
| Squalene epoxidase | 278 | 294 |
| Squalene epoxidase | 279 | 295 |

TABLE 11

Sequences of Additional Enzymes Associated with the Disclosure

| Name | mID | Nucleotide sequence SEQ ID NO: | Amino acid sequence SEQ ID NO: |
|---|---|---|---|
| CYP1798 | m1059383 | 296 | 305 |
| AtCPR1 | m967137 | 297 | 306 |
| CPR4497 | m1740376 | 298 | 307 |
| sgCDS | m1740366 | 299 | 308 |
| EPH3 | m1612980 | 300 | 309 |
| atEPH2 | m1612970 | 301 | 310 |
| ERG9 | m1028696 | 302 | 311 |
| ERG1 | m1028695 | 303 | 312 |
| ERG7 | m3331997 | 304 | 313 |
| UGT | | 314 | 319 |
| UGT | | 315 | 320 |
| UGT | | 316 | 321 |
| UGT | | 317 | 322 |
| UGT | | 318 | 323 |

[0240] It should be appreciated that sequences disclosed in this application may or may not contain secretion signals. The sequences disclosed in this application encompass versions with or without secretion signals. It should also be understood that protein sequences disclosed in this application may be depicted with or without a start codon (M). The sequences disclosed in this application encompass versions with or without start codons. Accordingly, in some instances amino acid numbering may correspond to protein sequences containing a start codon, while in other instances, amino acid numbering may correspond to protein sequences that do not contain a start codon. It should also be understood that sequences disclosed in this application may be depicted with or without a stop codon. The sequences disclosed in this application encompass versions with or without stop codons. Aspects of the disclosure encompass host cells comprising any of the sequences described in this application and fragments thereof.

### EQUIVALENTS

[0241] Those skilled in the art will recognize, or be able to ascertain using no more than routine experimentation, many equivalents to the specific embodiments of the invention described in this application. Such equivalents are intended to be encompassed by the following claims.

[0242] All references, including patent documents, disclosed in this application are incorporated by reference in their entirety, particularly for the disclosure referenced in this application.

1. A host cell that comprises a heterologous polynucleotide encoding a UDP-glycosyltransferase (UGT), wherein the UGT comprises a sequence that is at least 90% identical to any one of SEQ ID NOs: 76, 101, 89, 71, 73, 97, 88, 85, 95, 96, 86, 92, 69, 66, 78, 75, 98, 90, 67, 91, 93, 65, 99, 68, 70, 72, 81, 83, 84, 94 and 100, and wherein the UGT is capable of catalyzing conversion of mogrol to MIA1.

2. The host cell of claim 1, wherein the UGT comprises a sequence that is at least 90% identical to any one of SEQ ID NOs: 76, 101, 89, 71, 73, 97, 88, 85, 95, 96, 86, 92, 69, 66, 78, 75, 98, 90, 67, 91, 93, 65, 99, 68, 70, 72, 81, 83, and 84.

3. The host cell of claim 1 or claim 2, wherein the UGT comprises a sequence that is at least 90% identical to SEQ ID NO: 76.

4. The host cell of claim 1 or claim 2, wherein the UGT comprises a sequence that is at least 90% identical to SEQ ID NO: 66.

5. The host cell of claim 4, wherein the UGT comprises SEQ ID NO: 88.

6. The host cell of claim 1, wherein the UGT comprises the sequence of any one of SEQ ID NOs: 76, 101, 89, 71, 73, 97, 88, 85, 95, 96, 86, 92, 69, 66, 78, 75, 98, 90, 67, 91, 93, 65, 99, 68, 70, 72, 81, 83, 84, 94, and 100.

7. The host cell of claim 1 or claim 2, wherein the UGT comprises the sequence of any one of SEQ ID NOs: 76, 101, 89, 71, 73, 97, 88, 85, 95, 96, 86, 92, 69, 66, 78, 75, 98, 90, 67, 91, 93, 65, 99, 68, 70, 72, 81, 83, and 84.

8. The host cell of claim 7, wherein the UGT comprises SEQ ID NO: 76.

9. A host cell that comprises a heterologous polynucleotide encoding a UDP-glycosyltransferase (UGT), wherein the UGT comprises a sequence that is at least 90% identical to any one of SEQ ID NOs: 103, 74, 79, 102, 62, and 87 and wherein the UGT is capable of catalyzing conversion of mogrol to MIE1.

10. The host cell of claim 9, wherein the UGT comprises the sequence of any one of SEQ ID NOs: 103, 74, 79, 102, 62, and 87.

11. A host cell that comprises a heterologous polynucleotide encoding a UDP-glycosyltransferase (UGT), wherein the UGT comprises a sequence that is at least 90% identical to any one of SEQ ID NOs: 63, 77, 84, and 94, and wherein the UGT is capable of catalyzing conversion of mogrol to MIIE1.

12. The host cell of claim 11, wherein the UGT comprises the sequence of any one of SEQ ID NOs: 63, 77, 84, and 94.

13. The host cell of any one of claims 1-12, wherein the host cell further comprises one or more heterologous polynucleotides encoding one or more of: a cucurbitadienol synthase (CDS) enzyme, a C11 hydroxylase, a cytochrome P450 reductase, an epoxide hydrolase (EPH), and squalene epoxidase (SQE).

14. The host cell of claim 13, wherein the CDS enzyme comprises a sequence that is at least 90% identical to any one of SEQ ID NOs: 226, SEQ ID NO: 235, and SEQ ID NO: 232.

15. The host cell of claim 13 or 14, wherein the C11 hydroxylase comprises the sequence of any one of SEQ ID NOs: 280-281 and 305.

16. The host cell of any one of claims 13-15, wherein the cytochrome P450 reductase comprises the sequence of any one of SEQ ID NOs: 282-283 and 306-307.

17. The host cell of any one of claims 13-16, wherein the EPH comprises the sequence of any one of SEQ ID NO: 284-292 and 309-310.

18. The host cell of any one of claims 13-17, wherein the SQE comprises the sequence of any one of SEQ ID NOs: 293-295 and 312.

19. The host cell of any one of claims 1-18, wherein the host cell further comprises a secondary UGT.

20. The host cell of claim 19, wherein the secondary UGT comprises a sequence that is at least 90% identical to any one of SEQ ID NOs: 104-106, 108-114, and 121.

21. The host cell of claim 20, wherein the secondary UGT comprises the sequence of any one of SEQ ID NOs: 104-106 and 108-114.

22. The host cell of any one of claims 1-21, wherein the host cell is a yeast cell, a plant cell, or a bacterial cell.

23. The host cell of claim 22, wherein the host cell is a yeast cell.

24. The host cell of claim 23, wherein the yeast cell is a Saccharomyces cerevisiae cell.

25. The host cell of claim 23, wherein the yeast cell is a Yarrowia cell.

26. The host cell of claim 22, wherein the host cell is a bacterial cell.

27. The host cell of claim 26, wherein the bacterial cell is an E. coli cell.

28. A method of producing a mogroside comprising culturing the host cell of any one of claims 1-27 with at least one mogroside precursor.

29. The method of claim 28, wherein the mogroside precursor is selected from mogrol, MIE1, MIA1, MIIA, MIIA1, MIIE, MIII, MIIIA1, and MIIIE.

30. The method of claim 28 or 29, wherein the mogroside that is produced is selected from MIA1, MIIA1, MIIE1, MIE1, MIII, MIIIA1, MIIIE, siamenoside I, and MV.

31. A host cell that comprises a heterologous polynucleotide encoding a UDP-glycosyltransferase (UGT), wherein the UGT comprises a sequence that is at least 90% identical to any one of SEQ ID NOs: 104-106 and 108-114, and wherein the UGT is capable of producing one or more mogrosides from a mogroside precursor.

32. The host cell of claim 31, wherein the UGT comprises the sequence of any one of SEQ ID NOs: 104-106 and 108-114.

33. The host cell of claim 31 or 32, wherein the mogroside precursor is selected from mogrol, MIE1, MIA1, MIIA, MIIA1, MIIE, MIII, MIIIA1, and MIIIE.

34. The host cell of any one of claims 31-33, wherein the mogroside that is produced is selected from MIA1, MIIA1, MIIIA1, MIIE1, MIII, siamenoside I, and MIIIE.

35. The host cell of any one of claims 31-34, wherein the host cell further comprises one or more heterologous polynucleotides encoding one or more of: a cucurbitadienol synthase (CDS) enzyme, a C11 hydroxylase, a cytochrome P450 reductase, an epoxide hydrolase (EPH), and squalene epoxidase (SQE).

36. The host cell of claim 35, wherein the CDS enzyme comprises a sequence that is at least 90% identical to any one of SEQ ID NOs: 226, SEQ ID NO: 235, and SEQ ID NO: 232.

37. The host cell of claim 35 or 36, wherein the C11 hydroxylase comprises the sequence of any one of SEQ ID NOs: 280-281 and 305.

38. The host cell of any one of claims 35-37, wherein the cytochrome P450 reductase comprises the sequence of any one of SEQ ID NOs: 282-283 and 306-307.

39. The host cell of any one of claims 35-38, wherein the EPH comprises the sequence of any one of SEQ ID NOs: 284-292 and 309-310.

40. The host cell of any one of claims 35-39, wherein the SQE comprises the sequence of any one of SEQ ID NOs: 293-295 and 312.

41. The host cell of any one of claims 31-40, wherein the host cell further comprises a primary UGT.

42. The host cell of claim 41, wherein the primary UGT comprises a sequence that is at least 90% identical to any one of SEQ ID NOs: 76, 101, 89, 71, 73, 97, 88, 85, 95, 96, 86, 92, 69, 66, 78, 75, 98, 90, 67, 91, 93, 65, 99, 68, 70, 72, 81, 83, 84, 103, 74, 79, 102, 62, 87.

43. The host cell of claim 42, wherein the primary UGT comprises the sequence of any one of SEQ ID NOs: 76, 101, 89, 71, 73, 97, 88, 85, 95, 96, 86, 92, 69, 66, 78, 75, 98, 90, 67, 91, 93, 65, 99, 68, 70, 72, 81, 83, 84, 103, 74, 79, 102, 62, and 87.

44. The host cell of any one of claims 31-43, wherein the host cell is a yeast cell, a plant cell, or a bacterial cell.

45. The host cell of claim 44, wherein the host cell is a yeast cell.

46. The host cell of claim 45, wherein the yeast cell is a Saccharomyces cerevisiae cell.

47. The host cell of claim 45, wherein the yeast cell is a Yarrowia cell.

48. The host cell of claim 46, wherein the host cell has reduced or eliminated expression of EXG1.

49. The host cell of claim 44, wherein the host cell is a bacterial cell.

50. The host cell of claim 49, wherein the bacterial cell is an E. coli cell.

51. A method of producing a mogroside comprising culturing the host cell of any one of claims 31-50 with at least one mogroside precursor.

52. The method of claim 51, wherein the mogroside precursor is selected from mogrol, MIE1, MIA1, MIIA, MIIA1, MIIE, MIII, MIIIA1, and MIIIE.

53. The method of claim 51 or 52, wherein the mogroside that is produced is selected from MIA1, MIIA1, MIIIA1, MIIE1, MIII, siamenoside I, and MIIIE.

The application's sequence listing, which the Patent Office published only in electronic form, follows.

SEQUENCE LISTING (323 sequences)

SEQ ID NO: 1 - DNA, 1458 bp, Artificial Sequence
  Synthetic
atggcagagcaagcgcacgatctgttgcatgtattattgtttcccttccctgctgaaggtcacatcaagccattcctatgtcttgccgaattgctctgcaatgctgggtttcatgttactttcttaaacaccgactacaaccacagaaggttgcacaatttgcatttactagctgctcgttttccatccttgcacttcgaaagtatatctgatggtttgccacctgaccagccaagagatattttggacccgaaattctttatttcaatctgtcaagtgacgaagccactcttcagagaactccttttgtcgtataagagaatctcctctgtccaaacaggacgaccacctattacctgtgttataactgacgttattttccgtttcccaatcgatgtcgccgaagagttagatattccagttttttctttctgtaccttttctgctagattcatgtttctatacttctggattccaaaattgatagaagacggtcaattgccctatccaaacggcaacatcaaccaaaagttatacggtgtagctcctgaagcagaaggtttacttagatgtaaggatcttccgggtcattgggcttttgccgacgagttgaaggatgaccagttgaattttgtcgatcaaactactgcaagttctaggagctcaggattaatcttgaatacattcgacgacttggaagctccattcctgggtcggttgtccaccattttcaaaaaaatttacgctgtcggtcccatccactccttgttgaactctcatcactgcggtctgtggaaggaagatcattcttgtctggcctggttggattccagagctgctaagtcggttgtttttgtgtcattcggtagcttagtcaaaatcacatctcgccaattgatggaattttggcacggtttgctaaattccggcaagagcttccttttcgttttgcgatctgatgttgttgaaggcgacgacgaaaagcaagtcgtcaaggaaatttacgaaactaaagctgaaggtaaatggttagtcgttggttgggccccacaagagaaggtcttggcccatgaagctgttggtggtttcctgactcattcggggtggaactctattttggaatcgatcgcggccggtgtaccaatgatatcttgcccaaagattggtgaccaaagtagcaattgtacctggatctcaaaggtttggaaaatcggtctggaaatggaggatagatatgacagagtttctgttgagactatggttagatctattatggaacaagaaggtgaaaagatgcaaaaaacgatagctgaacttgctaagcaagcaaagtacaaggtcagtaaggatggtacatcttaccaaaacctcgaatgtttgatccaagatattaagaagttaaaccaaattgagggattcatcaacaacccaaatttttcagatttgttgagagtttaa

SEQ ID NO: 2 - DNA, 1452 bp, Artificial Sequence
  Synthetic
atggaccagatggcaaaaattgatgagaagaaaccccacgttgtgtttataccattcccggcgcaaagtcatatcaagtgtatgctcaaactggcccgcattttgcatcaaaagggattatatattacatttatcaataccgatacgaaccacgaacgacttgtcgcttccgggggcactcaatggttagaaaatgctcctggtttctggtttaaaacagtacctgacggtttcggttctgcaaaagatgatggagttaagccaactgacgccttgagagaactaatggattacctaaaaactaactttttcgatctctttttggacttagtattaaagttagaggtccccgctacctgcataatttgtgatggctgcatgacattcgcgaatacgatcagagctgctgaaaaattgaatataccagttatacttttttggacaatggcagcctgtggttttatggcattttatcaggccaaagtgctgaaggaaaaagagattgttcctctgaaagacgaaacttacttgaccaacggatatttagatatggaaattgattggatcccaggtatgaaacgtattaggcttagagatctacccgagttcattctggccactaagcaaaattatttcgcatttgaatttttatttgaaacagctcaattggcggacaaagtatcgcatatgataatccataccttcgaagaattggaagctagcttagtgtcagaaatcaagtctatatttccgaacgtttacactattggacctttgcagctattgctgaataagataaccctcaaagagactaataatgactcatatagtctatggaaggaagagccagaatgtgttgagtggcttaactctaaggagccaaactccgtcgtgtacgttaacttcggttccttggctgtgatgtctttacaagatctcgtcgaatttgggtggggcttggttaattcaaatcactatttcttatggatcattagagccaatctgattgatggtaagccagctgttatgcctcaagaactcaaagaagccatgaacgagaaagggtttgtaggttcgtggtgttcgcaggaagaggtccttaatcatcctgtggtaggcggtttcttgacgcattgcggttggggaagtatcatagagagcctttcagcaggcgtgcctatgttaggatggccgagcattggggaccagagggcaaactgccggcaaatgtgtaaagaatgggaagtgggcatggagataggtaaaaatgttaagagagatgaagttgaaaaactggttcgtatgttgatggaaggtttggaaggagagcgaatgagaaaaaaggctttagagtggaaaaagtccgctacattagcaacgtgttgtaacgggtcttcatcactggacgtcgaaaaattggccaatgaaattaagaaattatcgcgtaattaa

SEQ ID NO: 3 - skipped

SEQ ID NO: 4 - DNA, 1575 bp, Artificial Sequence
  Synthetic
atggagaagctacaggaaaaattaaggaagatcaagagagccgtccacggtgcaggcactttgcaaagacctaaatgttattgccaagtaaagttgtttccatccccacaagctattaagcgtgaacggccccatttccttttgttcccatttatggctcaagggcacatgataccgatgattgatctggctaaattattggcccaaagaggtgctatcgttacaatactgacgactccacataacgctgctagaacccactcggttctagcaagagctatcgacagcggtttgcagattagagtgaggccattacaattcccttgtaaggaagctggattgccagaaggttgtgagaatttagatttgcttccatctttgggttctgcctcaaccttctttcgtgcgacttgcttgttgtacgaccccagtgaaaagctcttcgaagaactgtctccaagacctacctgtattatctcagacatgtgtttgccatggactatccgtttagcacaaaaataccatgtcccgcgccttgttttctattccttgtcctgtttttttctattgtgtatgagatctttgaagaacaatccagccttaattagttctaagtcagattctgaatttgttacattctccgatctgccagacccagtagaatttttgaagtccgaattgccaaaaagtaccgacgaggatttagttaagttctcctacgaaatgggagaagctgatagaaagtcttacggtgtcattttgaacatcttcgaggaaatggagcctaagtatttagctgaatacggtaatgaaagagagtcgccagaaaaggtctggtgcgttggtcctgtttctttgtgtaacgacaacaaattggacaaagcccaaagaggtaacaaggcctctatcgatgaacgggaatgtattaaatggctgggtggtcaacagccaagttcagtggtttatgcttctctcggctctctatgtaatcttgtcactgctcaatttatcgaattgggcttaggtttggaagcttctaataagccctttatttgggtgattagaaagggtaacataacggaagaattacaaaagtggctagttgaatacgatttcgaggaaaagactaaaggtagaggtttggtcattttgggttgggccccacaagttctgattttgtcccacccaagcataggttgtttcctaacacattgcggctggaatagttccatcgaaggtatatctgccggtgtccctatggttacctggcctttgttctctgaccaagtattcaacgaaaagttaatcgtgcaaattttgagaattggtgtttccgtcggggctgaaactgcaatgaactggggtgaagaagaagaaaaaggagttgtcgttaagagagagaaggtcagagaggctatcgaaagaatgatggatggtgacgaacgagaagagcgacgcgaaagatgtaaggaattggctgaaaccgctaaaagagctatagaagaaggcggttcttctcacagaaaccttactttgttgatcgaagatattggtacctccttacgacgtctgtaa

SEQ ID NO: 5 - DNA, 1599 bp, Artificial Sequence
  Synthetic
atgcttatgcatgccttgacacccacggcgcctttcttttctatcaagccaaacactgaaccaccatcggcaactaccagacaaccgccaatggattcccctccacagaaaccacacttcctcctgtttcccttcatggctcaaggccacatgataccaatgattgacttagctaagttgttagctcaacgtggtgctatcattaccgttgtgactaccccacataatgccgctaggtaccacagtgtcttggcaagagctattgattcaggtctacatatccacgtattgcaattgcaattcccatgtaacgagggagggctacccgaaggttgcgaaaattttgacttattgccttctttgggttctgccagcacatttttccgggcgactttcttattgtatgaaccatccgaaaaggttttcgaagagttgattcctagaccaacctgtataatctcagatatgtgtttaccgtggactgtcagattggcccaaaaataccacgttccaagattagttttttattctctgtcctgttttttcttgctttgcatgcgaagtctgaagaacaaccaagctttgatttcttcgaagagtgactctgaattagtcaccttttccgacttgcctgatccagttgaatttttaaagtctcagttgccaaaatctaacgacgaagaaatggcaaaattcggttacgaaattggtgaggctgatagacaatcccatggtgttatcgtcaatgtcttcgaagaaatggaaccaaagtacttggctgagtatcgtaaggaaagagaatcccctgagaaggtttggtgtgtaggtcctgtgtcattgtgtaacgacaacaagctagataaggctcaaagaggtaataaagctagcatcgatgaaagagaatgtatagaatggctcgacggtcaacagccatcttctgttgtatacgttagcttgggatctctttgcaatttagtcactgcccaactcattgaattgggtttgggccttgaagccagtaacaagccattcatctgggttattcgcaaaggtaatataactgaagagttgcaaaaatggctcgtcgaatatgattttgaggaaaagactaagggtagaggtttggttattttagggtgggctcctcaagtcttaatcttgtcacaccccgctatcggttgtttcctaacacattgcggttggaactcatccattgaaggtatctctgctggtatgccgatgattacatggccattgttcgcagatcaggtcttcaacgaaaaacttatcgttgaaattttgagaatcggtgtttccgtcggcatggaaaccgcaatgcactggggtgaggaagaagaaaagggtgttgtggtaaagagggaaaaggttagagaagctattgagagagccatggacggggacgaacgtgaagagagaagagaaagatgtaaggaattggctgaaatggccaaaagagctgttgaagagggtggttctagccatcgaaatctaactttattgaccgaagacattttggtcaacggcgggggtcaagaaagaatggatgacgctgatgattttccaacaattgtaaattaa

SEQ ID NO: 6 - DNA, 1503 bp, Artificial Sequence
  Synthetic
atgggctctcagggacaagccgcaacttccggtaggggtgatgctgacgatacaggtggtggtacgcaagctgcgcatttcgtctttatccccttgatggctcaaggtcaccttattccagctgtagacactgccctgttattggctacccacggtgccatatgcagtattgttggtacccctgctactgctgcaagagtgagaagaaccgttgattcagctcgtcaatctgggttgacagttagattagtcgaatttccattggactacgctgaggctggtttaccggaaggtgccgataacatggacaatgttcctgtcgaatatatgcaaaactacttccatgcaatcgccttgctaagagctccaattgaatcgtacttccgcgcccacgctccatatccaacttgtgtggtttccgacttcatacatccatggaccactgttttggccgcaaacctcggggtcccaagattgtcttttttcagcatgtgtgctttttgtctattatgtcaacacaatgttgaacggttcgatgctttcgagggtgtcgcagatcacaacgaagccgtagttgttcctggcttggaaaaacgttttttagtcaccagagctcaggctccaggttttttccgtggctctgctgaatgggaggaatttgctgactacatcgaaagagccagagctgaagcggatggtgtcattatgaatactttcgaagaaatggaaccagagtatgttgctggatacgctgcggctaggaagatgagagtatggactgttggtccagtctccctgtaccatcaaagagcagctactttggctgcaagaggtaacgctatcgctattgacgcagatgaatgcttgagatggctcgacggtaaggaacctggttcagtcgtttatgtgtctttcggttcaattgcgcaagccgtcgctaagcaagctgttgaacttggtatcggtttggaagcttctggacaaccctttatttgggttttgcgcaacgctcatgaatacgatgaggctgccagagccttccttgatgaattggaagctagagtcgcgggtagaggtttattagtaagggggtgggctccacaggtcttgatcttgtcccacgctgctgttggtggtttcgttacacattgtggctggaatagcacgctcgaagctgtaaccgctggtttgccagtagttacgtggccacacttcaccgaccagtttctaaacgaaaaatttaccgttgaagttcttggtatcggtgtctctgtcggcgtcactgaacctctaatgtaccaagccgtcgagaaggaaattatggttggtagagatgttgttgaggctgccgtcagatcagttatgggtggtggtgaagaagctgaagaacgtcgtagaagagccagagccttggccgtaatggctcgcgcagctatgcaagagggaggttcgagtcatggcaatctgctagatcttgtgtctcgatttaaagctgcctcataa

SEQ ID NO: 7 - DNA, 1422 bp, Artificial Sequence
  Synthetic
atggcagtcgattctacagagaatagcgttgcgatcgtggccgttccattccccgctcaagggcatttaaaccagttgatgcacctttccctactgttggcttcacgtggcttacctgtccactatgctgctccagccgctcatgttagacaagcgaggtcgagagtacacggttgggacccgaaatccttggttagtatacactttcatgacttggatgtcccagctttcgaatctccagctcctgatccagccgctccatctccatttccaaaccatttgatgccgctgtgggaaactttcaccactgctgctagagccccacttgccgctctattagaaaccctatctgcgacgcacagacgggttgtggtcgtttacgacagattgaatagctttgctgccgtcgaagctgcacgcgttggaaagggtaacgctgaggctttcgccttgcaatgcgtagcaatttcctacaatattggttggctcgaccctggtcatcaattgttgagagatcacggtttggaatttttgccaatcgatgtatgtatgtccaaggaatttgttgaatttgtcttcagaactgagaaggaaatgcaagaagaaggtggtgctggtgctgcgcctgctggtatggtcatgaacacctctcgtgccatcgaaggagaatttattgatactattgctgcccacccagttttcgaaaaccagaaattattcgccgttggcccgttgaacccattactagacgcttcagcaagaacaccaggtaaggctagacatgaatgtatggactggttggacgagcaacccgctgcttctgtgttgtatgtttctttcggtactacaagctcattcttgggtgaacaaatagcggaactggccgcagctttaaaggggtctaagcaaagatttatttgggttctgagagaagctgatagggctgacatcttcgctgattccggtgagtcgcggaatcatgataaaatgttagcagaatttaccaaggaaactgagggtaccggtttggtcattaccggttgggctccacaactggaaatccttgctcacggtgccactgcggctttcatgagtcactgtggatggaactctactatggaatccttgtctcacggcaaacctattttggcttggccaatgcatagcgatcagccatgggacgctgaattactctgcaagtaccacaaggctggtttattagtaagaccatgggaaaagcataacgaggttgtcccagccgaagatattcaaaaggttatcgaagaagccatgctctccgacaatggtatggcagttcgtcagcgagccaaggtcttgggtgaagctgtcagagcttccgttgcagatggtggtacctctagtcaaggtttggatgatttcgtagctcatatatcgagataa

SEQ ID NO: 8 - DNA, 1383 bp, Artificial Sequence
  Synthetic
atggagacttcgccgacggaagtcgctgtagttatggttcctcttgccgctcagggtcacttaaaccaattgctacatctcgcacgattgatctcaggacgcagaggtataagtgtgcacttcattgctacctccactcattgccgtcaagcgacatctaggattcaagattggaatccagccaactctgctgctgtccactttcatgaagttgacgtcccattggcagaaaacccaccccctaatccagacagcgtttataaattcccatctcaagttatcccaattatcaagtccgctaccgtcaacttaagaaagccaatccacgatttggccctgtctctatcctcagcccacaaaagagtagttattgtgtacgattctgctaccgcatactccgttcaagacgctgaatcagttcctaacactgaattttattgtttccaatccaccgctgctttcacaatgtttgctttcaattgggaatttgccggtagaccagaattaccaccggaggcggaagtcttcaaggaagttccatctgccgaaggttgtttcgtccctgaatttgaagaattgatagctttcggcaacgagactaagattttgaagtctggttacatctacaattcatctcggattatcgagggtttttatttggatttgcgtttgggagatggtattgacaaaatttgggctttcggtccattccatagaactccagaaaaccctccagaaactggtagggaaaacgactgtcttaagtggttagatgagcagagtccgaacagtgtaatctttatatctttcggtaccacagtctcgttgtctgatgaacaaatccaagaaattgccactggcttagaaagatcacaccaaaaatttatctgggttctaagagatgctgacagagctgacatctttagtgggggtgaagtgagaagacctgagttgccaccaaatttcgaagaacgggtgggaggtagaggtagagttattagagactgggcaccacaaccagctattcttgatcatccctccacaggtggttttatgacccattgcggttggaatagcttcttggaaagcatatctgctggtgtcccaatggctacttggccaatgcactccgatcaaccaaagaacgctgccctgataacgaaggttttgaaggtcggggtcgaagttaaggactggcgtcgttggaaagaaattgttacggctgagacagtcgaaaattcggttagagtcctgatgggatctgaagaaggtgatgccatgagaaagagagcggctgttatgggcaaggccttgcgagagtccgtaaaagagaacgggtcttccgctatggaactcgatagctttttggaacacatcacttaa

SEQ ID NO: 9 - DNA, 1494 bp, Artificial Sequence
  Synthetic
atggcatccgaaaaaactcatcaagtacaccctccccttcacttcgtgttgtttccgttcatggctcagggtcatatgataccaatggtcgacatcgcccgtgttctggctcaacacggcgctacagttaccattgttaccacgcgatataacagcggaagatttgataatgtcttgtcaagggccattgagtctggtttaccaattaacatcgtccatgttaagttcccataccaagaatttggtttgccagaaggtaaggaaaacatcgacagtttggattctatgggtttaatggttccgttctttaaggctgttaatatgctcgaggatcctgtcatgaaattgatggaagaaatgaactctcgcccatcctgcattatatcggacctattgctgccatacacttctaagatcgccaaaaagttcaatattccaaagattgttttccacgggatcggatgtttttgtctattatgtgtccacgtattgagacaaaacttggacatcttgaagaacttgaagtccgaaaaagaatatttcagagtgccatctttcccagatagagttgaatttactaagcctcaaattacagtagataccaatgcttcaggtgactggaaggagttcttagacgaaatggttgaagctgaatacacttcctacggtgttatcgtcaacaccttcgaggaattggaacccgcgtatgtcaaggattacaaagaagctagagccggtaaagtctggtctatcggtccagtttctttatgcaataaggctgtcagtgataaggcagaaaggggaaataaggctgctatttaccaagaggaatgtcttaagtggctggactccaagaaagaatcatcagtattgtacgtttgtcttggttctatatgtaacttaccattggcacagttgaaggaattgggtcttggcctggaggaaactcaacgtccattcatttgggttatcagaggttgggaaaaatataacgaattgagcgaatggatgatggaaagtggttttgaagagcggattcgtgaaagaggtttaattatcagagggtgggccccacaagtcttgattttatctcatccttgcgtgggtggtttccttacacactgtggttggaatagtactttggaaggtattaccagtggtgtccccttattgacgtggccactctttggtgatcaattctgtaaccaaaagcaagttgttcaagtactaaaagtgggggtttccgctggtgtggaggaagttatgagatggggtgaagaagaaaaaataggggttctggttgacaaggaaggtgtcaaaaaggctgtagaagaattaatgggtgaatctgatggtgcaaaggatagacggaccagagtccaagaactaggtgagttggctcataaggctgttgaagaaggcggttcatctcacagtaacatcactttgttcttgcaggatatcagacaagttcaaagcgtcggtattttttaa

SEQ ID NO: 10 - DNA, 1392 bp, Artificial Sequence
  Synthetic
atggctataggttcagttgagtccgtcgccgtggtagctgttccctttccagcacagggccacttgaaccaacttatgcatttatctctattgttggctagccgtggtctggatgttcactacgccgctccacctgcgcatgtcagacaagctaggtcgcgcttacacggttgggacccagaagctttgagaagtatcagattccatgacttggatgtcccagcatatgaatcccctccgccagacccaacagccccaccattcccctctcatatgatgcctatgattcaatcttttaccgtggctgctagagccccattcgctgccctcttggaaagaatttcagcttcctactctcgagttgttgtcgtttacgatcggttgaatagcttcgctgctgcacaagccgctcgtttaccaaacggagaagcttttggtttacaatgtgtcgccacttcttataatatcggttggttggaacctgagcacagactcgttagagaacacggtttgcaattccagccaatggaagcttgcatgacgaaggaatttgttgaactaatttcaagagcggaacaagatgaagaaaacgccgcctgttccgggatcttgatgaacacctccagagctttggaggctgagttcatagatgaaattgcagcccacccaatgttcaaagaattaaagctattcgctgctggaccattgaatcctttgcttgacgctactgcgagaactgctgaccaaacccgtcatgaatgtatggattggctggataagcaacctttagcttctgtcttgtacgtatcctttggtactacgtcttctttaagaggtgaccaggttgcggaattggctgccgctctcaaaggttctaagcaacgtttcatctgggtattgagagatgcagacagagctgacatttttgcagatagcggtgaaagtagacatgctgaactattgtccagattcactgcggaaaccgagggcgttgggttagtcatcacaggttgggctccacaattggaaattcttgctcacggtgccactgctgcattcatgtcccactgtggttggaactctacaatggagagtttgtcctatggtaagccaatcttagcttggccgatgcactctgaccaaccatgggatgcagaacttgtttgcaaatacttaaaggctggtttattggtgcggccgtgggaaaaacattctgaagtagtcccagctgaagcaattcaagaagtcatagaagaagctatgttgtcagagaagggcatggccatcagacgaagagctaaggagttgggtgaagctgttagggcgagcgttgctgatggtggtagttctcgaaaaggactcgatgatttcgttggttacattacccgctaa

SEQ ID NO: 11 - DNA, 2964 bp, Artificial Sequence
  Synthetic
atggcacctatggaagaggaaccagtcagcgccactccacccccaccatcccctccacatttcgttattgtaccgctgccagctcaaggccacacgataccaatggtggacttggcttttcttctagctgaaagaggtgcgcgtgccaccttagttgtcactcccgctaacgcttctaggttgagagctgccgctgggttggctgccagagctaatttaccattagaaatcgttgaattgccattccctccacctgcggaaacaggattgccagctggtgtcgagaacgttgatcaggttaccgattacgcacactttttgccattcttcaccgcactccgttcattggctagtccactagaatcgtatttaagatccttgccgagtccgccatcttgtcttatctctgactggtgccaatcttggacttccgacgttgctactagaggtggtattccacgcttgtttttccatggtccatcttgtttttactcattgtgtgatttgaatgccgctgcccacggtctacaaccacaacatggtgaaagattcattgtcccaggtatgccagtgagagttgaggtaaccaaggaaaccagacctggttttttcaaagaacctggctgggaagcgatccacgaagctagcatggaagctatgagaacagctgatggtgcagtcgttaacactttcgttggtctggaatctcaattcgtcagttgctatgaaactgctttaggtaagcccgtatgggctttgggaccttttagcctgtacaaccgggatgccgacatgatggcctcccgaggtaatgacaacacttcagatgtcgatgctcaaacctggctcgacgagattgacgaagatgactctgttatatacgtgaactttggttctttggcaagaaagccaccaaaatatctatttgaagtagggcacggtttagaagattccggtaagcccttcttatgggtcgttaaggaatctgaagtcatctccccagaagttgagcagtggatgtcggcattcgttttgagaacagctacaagaggtttggttgttcgggggtgggccccacaattggcgatcttgtcacatagagctgtgggtggttttgtcactcactgtggttggaatagcatgctagaagctattgcccacggagtcccagtcgttacttggcctcatttcgctgatcaatttctaaacgaacgacttgctgtcgatgtcttgggtgttggtgttcctattggtgtgaccatgccagttatgttgttcggcgatgaggcagttccagtcactcgtggggacgttgcaagagctgtttctgccctgatggacggtggtgaggaaggtgaagaaagaagaagaaaagctaaggaatacggtgaaaaggctagaagagctatggagaaaggaggttcttcctacgaatccctcactcaattgattgattctttcacattacaagcaatggaaaccactgaacaagcttcacaaccgccaccacatttcgttttagttccattggctgcccacggacacttgctccccatggttgacttggctcgtttgctagcctctaggggtgtcagagtatcattggctacgaccccattaaatgttgcacgtctgcgcggggtagctgaccaggctgcgcgtgaaaagttgccgttggaattagttgaattgccattctccccatccgcagagacaggtctgccaccagaatgtcaaaacgctgataagatcgccgacgacgctcagttggtcccgttgttaaatgcgatgagagatgccttggctgctcccttcgatgcttatgtcagggccttgcgcccaaaaccaacctgtgtagtctctgatttttgtaacccttggaccgccgctgtctcgcgtagactaggcattccaagattgttttttcaaggtccttcctgcttttactctttgtgtgacttgaagtctgccgttcacggtctacaagatagaatcgtcgctgacgagcatggtacagctttcgtagttccaggtatgccagtgcacgtcacggtcactagaggtactgctccgggattttacaacgctccagatttcgacgccctaagacacgaagctatggaagcaatgagaactgctgatggagctgttgtcaatactttcgcagatttagaagctcaattcgttgagtgttacgaagctactctgggtaaaccagtttgggctttgggtcctttttgccttggcaacagagatgacaccctaatggcttcgtgtggttcaaccgtcctgagtgtggatcaaagagctcttgcggcatggttggacgaacaagccaccggtagtgtggtttatgttaacttcggtagtttagttaggaaggcccctgctcagttgttcgaaataggtcatggtttggaagattctggtaaaccattcctatgggtggtcaaggaatcggaagccacagctgccactgctgaagccagagactggcttgacgctttcgttgccagaaccgctactagaggggtggttgtcagaggttgggctccacaagttgcgattctatctcatagagcagttggaggtttcgtcacccactgtggttggaatagcttactcgaagctgttgcccacggtgtaccagtagttacttggcctcattttgccgaccaattcttgaatgagaagttggtagtcgatgttttaggtgttggtgtgccaattggggttactgctccggtacaaatcatggatgacgtatccttgcctgtgtctcgcagagatgttgctagagctgttttggaactaatgggtgatggtgaggtcgctaacgaaagaagaagaaaggccaaggaatacggtgaaaaggcgagaagggccatggaaaagggtggttcctcttatgagtgtatgactcaacttatacagtcctttatgccatccggtgttacagaataa

SEQ ID NO: 12 - DNA, 1401 bp, Artificial Sequence
  Synthetic
atggcaactgatcttttacagggttcctcagcttcgccacccgtcgtagttgttatggtcccattcttggctcaatctcatctaaatcaactgttgcaatttgcccacgttgtgagcagttatgacttgccggtccactacgtttcttccacgttacatatctctcaagtcaaatcccgagcttctaacccattgaaccaactcaccaagatacacttccatgattaccacgttccttttcaacctccaccaccacctccaaatttgtgtagcaagtctaaattcccaagaaacttaattccatgctttgaggcttctacacatttgcgtcagccagtagccgctttgcttagagccttatcccctactgctaagcggttggttgttgtccacgacctcttaaccgcgtcagtcgttcaagacgtggtcagtttgcctaacgctgaagcctattcagttaactgtggctcgattttcgcttactttgcatacttgtgtgatggactaggtcgcaatgacatcgttccaattaaggatatcccaccctgggactcctgtttccctactgtcgtgaacgatttcatcgccggtcaaattagagaaaccaagttccaagcgggggaactactgaatagctgccgtgctatagaaggtccatttcttgaattgttggctaatgatattaactctcagggtgaaaaaaagacttgggcagtgggaccactccaccaaactaccatctccaaagagttgagggacagagataagtgtttgttggaatggttagatcaacaagaaccaaactctgttttgtacatttctttcggtacaaccacaacctttagtgacgaagagatcaaggaaattgctttgggtcttgaacaatctggcgttaagtttatttgggttttgagagatgctgacaaggctgacatcttcagcaacgaagaagtaagaagaccacaattacccgatggtttcgaagaaagaattaagggtatgggtatggtcgttcgtgaatgggtcccacaagtggaaatccttggtcatccgtctactggtggctttatgtcccactgtggttggaactcctgtatggaatcaatcagtctaggtgttccaatagcagcttggccgatgcactctgaccaacctatgaatgccttgttgatcactgaagtcttaaaagttggcgtcgctgttagagagtgggggcaaagagatgaactggtcacgtcatctatgatttccagagcagttagaaagttaatggcttccgaggagggtgatgaaataagaaaacgagctggtgaactaggtggtgaagttagaaaatcaactgctgaagaaggtattacccgtttggaatggaactctttcatcgctcatattactagataa

SEQ ID NO: 13 - DNA, 1434 bp, Artificial Sequence
  Synthetic
atggaacaaaccagagttccacacgtcgtgctcctacctttccccgcctatggacatattaaaccaatgttgtcattagctaagttgttttcccacgcgggtttcaggatcacttttgttaatacagagcagtaccatgatcgcttgttcggtaacacggacgtcaccgcattctacaagcattttccaaactttttgtgtacttctataccagacggcctgccgccagataatcctcgtttcgggatttatatcaaggattggttctgctctaacaaacccgttagtaagttagctttcagacaattattgatgaccccaggtagattgccaacttgtattatttccgactctatcatgtcgtttgctatcgatgtagccgaagaattaaacattccaataattaccttcagaccttacagcgcttactgttcatggtctgatttccacttcagtaagcttgctgaagaaggagagttgcctgttactgacgaaaattttgacaaatctgtcacctgtatcccagaattggaaaacatctttagaaacagagacttgccatccatttgcagacacggtggtccagatgatccgatcctccaaacattcattcgagacacgtccgccactactagaacttctgctctggtgatcaacacattcaatgagattgaaggtccaataatgtctaagttgggttcaagacttaccaaaatttatactataggtccactgcatgctttattgaagtcacggattcaagaagattccgttgaatcttccccattggaatcaaacaactgtgtcctatctaaggaagatcgttcctgtatgacatggctaggttctcaaccatctaggtctgttctatacgtttcctttggtagtttcatcaaattgagcggtgaccaaatcttggagttctggcacggtattgtcaatagcggcaagggttttttgtgggttataagatctgatttaatcgatggtgaatctggtgtcggaccagtaccagcagagttggaccagggtaccaaggaaagaggttgcatcgtatcctgggctccccaagaagaagttttagctcaccaagctattggcggttttttgactcacagcggttggaactctaccttagaatccatggttgccggtgttcctatgatctgttggccgcaagtcggtgatcaacaagttaattcaagatgtgttagtgaaatttggaagattggctttgacatgaaagacacttgcgatagatcgactattgaaaagttagtcagggacttgatggataataaaagagacaagatcatggaatccacggtgcaaatcgctaaaatggcccgtgatgcagtcaaggagggaggtagttcttatagaaatttggaaaagctgattgaagacataagactgatggcgtttaaggcctaa

SEQ ID NO: 14 - DNA, 1482 bp, Artificial Sequence
  Synthetic
atggcatcccaagctaaacagttacacttcttgctatttcctttgatggctcaaggtcatatgatcccaatggtggatattgcgagaatgcttgctaagcgtggagccatggttaccatagtaactacaccccacaatgccgctcgattcgaacgggtcctcactagagctatcgagactgggttgaggattcaaattatccaattaaagtttccatcagaagaagcgggtctgccagaaggctgcgaaaacttcgacatgttgccatctttggacttggcttctaagttgttcgctgctgccagtatgcttcaacaacctgccgagaaatcctttgaagaactgaccccgcaaccaaactgtattattgctgatatgtgtttaccatggactatcaatatagcaagaaagcataacatccctagaatatctttccacggtgtttgttgtttttgcttgctatgtctccacaatgttagatcgtccaaagtcttagatcatgtcgactcagaaaccgaatacttcattgttccagacttgccggatcagatcgaagttacgaaggctcaactgccagtcttattgacatctaacttgaaagagtttcacgaccaaatgattgaagctgaaatcggtagctatggtgcaattattaacagtttcgaggaattggaaccagcttacatccgtgattacaagaaggtcagaaaggacaagatctggtgtattggtccagcctctttgtgcaacaaagatgatcttgataaggctcaaagaggtaataagtccagcgtagacgaatatcaatgtctgaaatggttggactcttggaagccttcctctgttgtttacgtgtgtttaggttctttatgcaacttggtttattcccaattgatcgaattgggtttaggtttagaagccagcaatagaccattcatttgggtcatccgtggcggtaccagtatgtccgaagagttggttaaatggttgaaggaagatggttttgaggaaagaactaaaggtagaggtatggtcattttggggtgggctccccaggttttgctattatcgcatccagcagtaggcgctttcctaactcattgtggttggaatagtacgcttgaaggagtctgtgcgggggtccctatggttacctggccattattcgctgatcaatttttgaacgaaaagcttgttgctcaaattttgaacgtagccatcagtctcggttctgaagctacgtctaagtggggtgaagaagagcaggaacaagttggtattaaagttaagactgataccataaagtgtgtgttggaacgcgtcttggatgagggtgaagaatccaaagaaagaagagaacgagcacgcaagctaggtgaaattgctaagcgtgctgttgaagaaggtggttcatctcacttgaatatgactctatttttagaagagattatgcaattgggtacttactctcaaagagaataa

SEQ ID NO: 15 - DNA, 1524 bp, Artificial Sequence
  Synthetic
atgttagagtctttctttcttgcattgaaaatccgtatgggttccgaaactacaaacaagtcgtacccattgcatttcgtcctgtttcctttcatggcccagggccacatgattccaatggttgacatagctaggctactagcgcaaagaggtgtaaccgttactattgtgacgaccccctataatgctggacggttcaacaatgtcttatcaagagccatcgaatctggtttgccaattaacatcgttccagttaagtttccataccaagaagtgggtttaagtgaaggtcaagagaacatagatttgttggattctatgggtttaatgattccgttctttaaggcttgtaatatgttggaagaacctgtcaaaaagttgatggaagaaatgtccccaccaccttcttgcttgatctcagacatgtgtcttccatatacttccaaactcgctaaggaatttaacattccaaagatcctgttccacgggttctgttgtttctgcttgttgtgtatgcatgttttgagaaagaacagagagattttagaaaacttgaagtccgataaagaatacttcgtcgtaccgtactttccagaccgagttgaatttacacgcccacaagttccagtcgaaacttatagcccagaagagtggaaggaatttttggaagatcttaaggaagctgacaaaaccagttatggcgttatcgtcaatactttccaagagctcgaacctgcctacgttaatgattacaaggaggcaagatctggtaaagcttggtctataggtcccgtgagcttgtgtaacaaattaggtgctgataaggcagaacgtggtaacaagtccgacattgaccaatcggaatgcttaaagtggttggactcaaaggaagaaggatctgtactatacgtctgtttgggctctatttgtaatctaccactagcgcaattgaaggaattaggtttggggttggaggaatccaaaagaccgttcatctgggttatccggggttgggaaaagtataaggaacttggtgaatggatttccgaatcaggttttgaggaacgtattaaagataggggtctgataattagaggttggagcccacaaatgatcatcctatcccacccatctgtcggtggtttcttaacgcattgcggttggaactctaccttggaaggtattacttctggattacctttgttgacctggccattattcgctgatcagttttgtaatgaaaaattggtggttcaagttctgaaggccggtgtaaaggttggtgttgaagaggtcatgaagtttggcgaagaagaaaaaattggagtcttggttgataaagaaggtgtcaagaaggctgttgaagagttaatgggtgaatctgatgacgctaccaagagaagaagaagagccaaggaattgggtgagttggctcacaaagccgttgaagaaggtggttcttcgcactctaacataactctattgctggaagacatcactcagttggctcaatccaaaaagtaa

SEQ ID NO: 16 - DNA, 1488 bp, Artificial Sequence
  Synthetic
atggcctccaagactacccaacagttgcatcctccacttcactttgttttattcccattcatggcacaaggccacatgatccccatggtagacattgctcgtctactggctcaacggggtgttacaataactatcgtcacgacccctcacaacgctggtagatttaaaaatgtgttgtctagggccattcaatcgggtttaccaatcaacttgatgcaagtcaagttcccatcattggaatctggaagcccagaggggcatgaaaatgttgatatgattgactccatggaatctagtgtctctttttataaggctactaacatgttggaagaaccagttgaaaaactgttaaaggatattaacccgcgaccatcctgcataatcggtgatatgtgtttgccatacacaaatagaattgctaagaaattcggtattccaaagatcactttccacggtatgtgttgtttcaacctcttgtgtattcatatcatgagagaaaaccacgagttttggggttctattgaatctgacaatgagtacttcccagtacctaactttccggatagagttgaatttaccaaatcacaattgtctatggtccacgcaggcggtgactggaaggaatttttcgatgaaatgaaggaaggtgacaaaaacagttacggagttatcgtgaataccttcgaggaactcgaaccagcttatgtcagagattacaagaaggttaaagcggggaaggtctggtccataggtcctgttagcttgtgcaataaggttggtgccgacaaggctgaaagaggtaacaaagctgcgattgaccaagatgaatgtactaagtggttagatactaaggaagagggttccgtgttgtatgtttgtctaggttcaatttgtaacctaccgctatctcagttgaaagaattgggtttaggtcttgaagagtcccaaagaccattcatctgggttattcgtggttgggaaaagtacaatgaattggtcgaatggatctcagaatctggctacaaagctagaatcaaggagagaggcctgttaataagaggttggtccccacaaatgcttatcttgtcgcatccagctgtcggtggttttctcacccattgtggttggaatagtacattggaaggcattacgtctggtgttcccttgatcacatggcccttgttcggagatcaattctgcaacgaaaagttggccgtacaagtcttaaaggtgggtgttagagccggtgttgaaaagttgatgcgttggggtgaagaggaagaaataggtgttttggttgacaaagaaggtgtcaagaagttggttgaagagttaatgggtgaatctgatgatgctaaggaaagaagacgcagggctaaggaactaggagaactggcccacaaggctgttgaagaaggtggtacttcccattctaacattaccattctcttggaggacattatgcaacaagcacagaacaacaattaa

SEQ ID NO: 17 - DNA, 1242 bp, Artificial Sequence
  Synthetic
atgaaaatactgtttttccctgtccccgcccatggacacgtaaatccaatgttgccattagcacgtgaactcgttagtagaggtgacgaggtgttgttctatgttacgccagaatttgaagctgtcgttagggctacaggtgcttccgtcagattccttgataaggctttgtcgatcagagaagacttaagcggcccaggtggtggtcctccaagatttcaacagattattccggaattattgggtttgatgtccttgggactacgggaagcgccacgaatggctgagcaagccagagcagaaaaggctgatggtgttgtttacgaccctatcgccccatggggtagagctatcgctcaccttttgggtgtaccggctgcgattttccaaacttctttcgccatgtcttctccatggattcaacgtgaaatgaaaaagacttttaacggtagaccacccttggctgcattgcggcccctgttagagatgcaatggaacgctttgatgctcgaactaagacatggggtcccaagattgggaatgaagggtatgttcgctcacgccgaagggctaaacatcataccagttcctaggtcataccagcctgatgctgaacttttcgatgctcgccatttgttcgtgggtccagcagttgctccaagaggcgactctggtgattttcctttggaacaattagaaggtaaaccagtcttgtttgtctcgttaggtaccagtcccatgaatcaacaaccagatttctacaaggcctgcttcgaggcctttagagacacccgttggcaagtagttatggcttgtggtaagaacttagaccctgctagattgggccctactccatctaatttcattgttcgtcaaagagttccgcaggtggaaattttgtccaaggcaagagtctttctgacacacggtggtatgaactcaaccatggaaggtttgtggcacggtgttccactcgcagttttcccccaatttggtgatcaaccaatcaacgctgctagagtcactaatatgggtttgggcgccaccctaactccacaagatgctctgactccaagagttttaagagaaaccgtggagagattggacactgacccaggttatagaacgagaatggccggtttccaaaaagaattacaggaagctggtggtcaaagacgtgctgccgatgctttgcaggcatacgtcgctgccaggcaagggccatccagaagggctgcttaa

SEQ ID NO: 18 - DNA, 1383 bp, Artificial Sequence
  Synthetic
atggacgagactaccgtaaatggaggtagacgtgcttcagatgttgtggtttttgccttccctagacacggtcatatgagcccaatgttacagttctccaaaagacttgtttcgaagggcttgcgagtcacatttttgattactacctctgctacggaatctctaagattgaacttaccaccctcctcatctctggacttgcaagtcatcagtgatgtcccagaatccaacgacatagcaacattggaaggttatctcaggtctttcaaggctactgtttctaagaccttagcggatttcatcgatggtattgggaatcctccaaaatttattgtgtacgacagtgttatgccatgggtccaagaagtcgctagaggaagaggtttggatgccgctccatttttcactcaaagctccgctgttaaccacatcctgaatcatgtttacggtggttcgttatctatcccagcaccggaaaacactgccgtcagcttgccgtccatgccagttttgcaagctgaagacttgccagcattccctgatgatcccgaggttgtcatgaacttcatgacctctcaattttctaatttccaagacgctaagtggatttttttcaacacgttcgaccagctagaatgcaagaagcaatctcaagtggttaattggatggccgaccgttggccaataaaaacagtaggcccaactattcctagtgcttatttggatgatggtagacttgaagatgacagagctttcggtttgaacttattaaagccagaagatggtaaaaacacccggcaatggcaatggttggattctaaggacactgcttccgttttatacatctcatttggttcattggctattctacaagaggaacaagtaaaggaactcgcgtactttctaaaagacaccaacttgtctttcttgtgggtcttgagagactccgaactgcaaaaattgccacacaactttgttcaggaaacttcgcacagaggtttagtcgttaattggtgtagtcaattgcaagttctgtcccatcgtgccgtatcttgtttcgttactcactgtgggtggaactctacattggaggccttatccttgggtgtcccaatggttgctatccctcagtgggttgaccaaaccactaacgccaagttcgttgctgatgtctggcgtgtaggtgtgagagtcaagaaaaaggatgaaagaattgttactaaggaagaactggaagcttcaatcagacaagtcgtgcagggagagggtagaaacgaatttaagcacaacgccataaagtggaagaagttagctaaagaagctgtggatgaaggtggctcatctgataagaatattgaggaatttgttaaaacgatcgcataa

SEQ ID NO: 19 - skipped

SEQ ID NO: 20 - DNA, 1203 bp, Artificial Sequence
  Synthetic
atgacagaagcaaaaagagctcacattgccatgttttccatagctgctcatggtcacgttaacccttctatcgaggtcattcgtgaattggtagctaggggccatagagtttcatacgccatcccaccatctttcgccgaaaaggtcaccgctacgggtgcagaacccgttctatggaatagtactcttccaactgatgacgaaccagaagcttggggaaccgaattgattgataacatcgagccgttcctgaatgacgctatacaggcattaccacaattggcggacgcttttgcaggtgatgaacctgatttagtgttgcacgatattaccagctatccagctagagtcttggcccatagatggggtgttcccgccatctcgttgtctccaaacctagtggcttgggacggttacgaggaagaagttggtgaaccaatgactgctggtcttagagccacagaaagagggcgcgcttactatgctcggttcgaatcatggttgtccgagaacggtatcggtattcaccctgacccatttgttgggcgacctgctagatctctcgccctaattccaagagtactgcaaccaaatgctgatcgtgtcgacgaatctgtgcacagcttcgtcggtgcgtgtcaaggtgacagagctgaacaaggcgaatggaggcgaccagctggcgccggtaaggttttattggtttcattgggttccgctttcactaagcaaccagcgttttacagagagtgcgtaaaagctttcggtgatttacctggttggcacgtggttttgcagataggaaagttcgttgatccatctgaattgtcccctgtcccagcgaacatcgaagttcatgactgggtcccgcaactcgctgttttgagacaagccgatgtcttcgttacgcatgctggtgctggtggttctcaagaaggtttggcaaccgctactccaatggttgccgtcccacaagccgtagatcaatttgggaacgctgatatgttagcaagtttgggtgttgctagacacttacctatggaggaagctactgctggtggccttcgtgacgctgtcctggcgctagcagctgatccagaagtagcaagaagattggaagaaattagattgtccatgttgttagaaggtggtacaagaagagctgccgacttgatcgaagctgagctaccaccaggtgattaa

SEQ ID NO: 21 - skipped

SEQ ID NO: 22 - DNA, 1185 bp, Artificial Sequence
  Synthetic
atgagacaaacgcacatcgcaataattaatgtaggcgctcatggacacgtcaacccaaccttgccggttgctgaggaattagttaaccgtggtcatagagtgactttcgccacaaccgaagaatttgaagcggccgttgctaaaactggtgctgtcccactactgtataggaccagtattaaggctgaccccaagactatcaaggagagagtcaacaaaaatgatgcgttcgttatgtttttggaagaagctgttgaagttttgccacagttagaagaattgtacaaggacgatcttcctgacattgtcttgttcgatttcttagccctcgctggtaagttgtttgctgacaacggtgggatcagagccgtcaaattttgccctagctacgccatgaatgaatacttccaattgggtcgggatgaggaaacaatggaagctgcaaagcaagctattgaagaatatcaagagaaaatagaaaacgaacaactgaagagaatgactatggaagaatttttcatgcccgaaaagttaaacatcgttttcatgccaagagcttttcaaccaaagcaggagactttcgatgaaagattctgttttgctggtccatctttgggtaagcgtaccaatactggttcccttgaaattgatgccgctgatgagcgtcctctaatgttaatctctttgggtaccgcatttaacgcttggccagaattttaccaaatgtgtattgacgctttcagagactcggaatggagagtaattatgtcagtcggcaccaccatcgacccagattctttctccgacgtaccagatcacttcattatcagacaacacgttccacaattggatgttttgaaaaaagcgaagctattcgtcagccatggtggtatgaactccactatggaggccatgaacgctggagttccattagttgtggtccctcaaatgcatgaacaagaagtcacggctaagcgcgttgacgaattgggtttgggcgtccacttaccaccgaaagaagtcactgctgctagattacaaaaggaagttcagaaagtttatggtgataagaatatcttatctagggtaaaatctatgcaacaaaagatagaagagactggcggtgcaaagcaagctgtttgtgcaattgaagaatttttgaaggaagcttctgttgagaattaa

SEQ ID NO: 23 - DNA, 1305 bp, Artificial Sequence
  Synthetic
atgtcgactggaaagaccatagctttctttcctgaggcagcttacggcccagcgttaaattcagtgggtattgcccaagaatgccgggaattgggtcatgaaccagtattcctgacagatccgcccatggctgaagtttttgaagaccacgggttcgaaacttatgaagttaacatggccgatccttccctaaccgccgaggaaaaatctaagtactgggacgacttcatcaacaagcacatcccaaattttgataaagagccatacgatcagttggacaactatattactgaatgttgggatgctattgtcgaaaccgctacgtgggctcaacaagacttgccagacgttcttgaagaagtcgatccagatttaatctgtgtcgacaacgttattttgttcccagctataaagcaatacggtgttccatgggtgcgtatcgtcagttgtagcgaaaacgaaattcctgatccaaatattccgccatatttgtctggttgcagagccgacgacgttgaatcccatcacgaatttgagagaagatacgatgaacttatcgctcccgtccatgacgatttcaatgactttctcagagagcacggtgaagaaccatacccacatggtttgttctttgaaacttctccttacttaaacttgatcaagtatccagagaggctacgttgggatagatggaacgaattggatccggatagattccaatacttgaatggatgtataagagatgaagacgaaacatatgaagttccacctattggtgacgaagatgacccattagtttacttgtcttacggttccttgggtgcgggcgataccgatcttatgaaaagactcttagagtttttcggttctcaaccatatagattcctggtaaatgtgggtgaatacatcgaagaatatgacgaatcccagattccagagaacgtcgaaatagattcttggttcccacaacaatctgttatttcacaagctgacatcgttatccaccacggtggtaacaacacttttaacgaatgtctatactacggtaagccagcaattatcatgccttacgtctgggatggccaagacaacgctacccgtttggatgagactaatcatggtattaagttgcacagatccgactggacacctgaggaatttgctgaagccttggaaagttgtttaactgacgaagaaatccaagctaatgtcgctgaaactagcgcagacatgcaagaacatagcggtaccgaaaaagccgctcgcctgttggatgacgttttggaagatcacgcaaacgtttaa

SEQ ID NO: 24 - DNA, 1218 bp, Artificial Sequence
  Synthetic
atgacgtcaccagcacacatcgccatgttcagtatagctgctcatgggcacgtgaatccttcgttagaagtcattcgagagttggttgctagaggtcatagagtaacatatgctgtcccaccagtttttgcggaaaaggttgccgctaccggcgcagaacccaaatcctggacttccaccctacctggtccagacgctgatccagaagcttggggttctactcttttggataacgttgaacctttcttggctgacgccattcaagccttgccgcagctgatcgaagcctacgagggagatgaaccagacttagttttgcacgacattacctcttacccagctagggtcttagctcatagatggggtgttccagcagtctctttgagcccaaacctagtcgcttgggaaggttatgaggaagaaatcgctgaacccatgtgggccgaacctaagaaaactgaacgtggtcaagcttactacagaagatttgaaaattggctcaaggaaaacggtgtggatctacacccagatccattcgttggtcggccagacagatctatcgtgttgattccacgtgctcttcaacctaacgccgatagagttgacgagagggtttattccttcgttggtgcatgccaaggagacagaactaccgaaggtggttggcaaagacccgctggtgcggaaaaggttgcgttggtatcactgggatctgcatttaccaagcaacctgctttctacagagaatgtgtcagagcttttgcaggtttaccagggtggcatttggtccttcaagttggccgccacgtcgatccagctgaattgggtgaaatcccgccaaacgttgaagtaagagactgggttccacagctggccattttgaaacaagccgatttattcgtgactcacgctggtgctggtggttcacaagaaggtttggctactgctacaccaatgattgctgtcccacaggctgtggatcaattcggtaatgctgatatgttacaagcgttaggtgttgcaagacacttgccaactggggaagctaccgccgaagctttgagagagacagccctggctttgaccggtgacccggaggtagccagacgtttaaaggatatacaagctgaaatggcacaggagggcggtactagacgtgctgctgatttgattgaaacagaattagatgcggctagagcttctcgagccggtgcataa

SEQ ID NO: 25 - DNA, 1200 bp, Artificial Sequence
  Synthetic
atgactgaatcaccaagagcccatatcgctatgtttagcattgctgcacacggacacgtcaacccttcgttggatgttatacgtgagttagtgtccagaggccatagagtatcttacgctattccagcgtctttcgctggtaaagtcgccgttaccggtgctgaaccagttatctatacaagtactctacctaccgaagaagaccccgaagcatggggtaccgaacttattgacaatttggagccattcttggatgacgctgtccaggctttaccacaattggcggctgcttttgatggtgacgaaccagatctggttttgcacgatatcacgtcttacccggcccgggtcttagcacataggtggggtgttccagctgtagccctctggcctaacttggtcccctgggaaggttatgaaaaggaggttggtgaaccaatgactgccgaaatgagacaaactgaacgcggcagagcttactacgaaagattcgctgcttggttgtccgagaatggtctaggtcacttgtcttctgacgatttcgttgcccgtcctaggagagggctcgttttgattccagaagctctgcaaccaaacgctgaccgagtggatcacggtatgtttacatttgtaggtgcgtgtcaaggtgatagagccgaccaaggtgaatggagaagaccagctggagctgaaaaggtcttgttagttagtcttggttccagcttcactaagcaacccgcgttctacagagagtgcgttgccgctttcggtggtttgccaggatggcatgtggtcctgcaaataggtgctcacgttgacccagctgaattgggcgacgtcccagcaaacatggaagttcatccttgggttccacaattagccgttctaaaacaggctgatgcttttatcacccatgctggggcaggtggttcgcaagaaggcttggccactggtactccaatggtcgctgtccctcaagctgtagatcaattcggtaatgccgatatgctacaagctttgggtgtggcgagacacgttccaatggaagaggctgacgccaccacgttaagagaagcagttttggctttggttggtgatcccgaagtcgctgaacgttccgcccggctaagagaaagaatggctaaggaaggtggtactttaagagcagctgacctcattgaagctgaattgccgagataa

SEQ ID NO: 26 - DNA, 1383 bp, Artificial Sequence
  Synthetic
atggacgaaacaactgtgaatggcggtaggcgtgcttccgatgttgtcgtattcgcctttcctagacatggtcacatgtctcccatgttgcagttcagtaaaagactggtttcgaagggattgagagtcacctttctaattacgacttctgcaaccgagagcttaagattgaacttaccaccatcatcctctttggatcttcaagttatctctgacgttccagaatccaacgacatagcgactttggaaggttacttgagatctttcaaggctaccgtcagtaagacattggctgatttcattgatggtatcggtaatccgccaaaatttattgtttatgactcggtgatgccttgggtccaagaagttgcccgcggaagaggtttagatgctgctccattcttcactcaatcctctgccgttaaccacatactaaatcatgtctacggtggttccttgagcattccagctcccgaaaacaccgcagtatctttaccatcaatgcctgtcctgcaagctgaagatttgccagcctttccagacgacccagaggtagttatgaacttcatgacttctcaattttcgaactttcaagacgcgaagtggatcttcttcaacacatttgatcagttagaatgtaaaaagcaatcacaagtcgttaattggatggctgatagatggccaatcaagactgtgggcccaactattccttctgcttatttggacgatggtagactcgaagatgatcgtgccttcgggctgaatttgcttaagcctgaagatggtaagaacaccagacaatggcaatggttggactccaaagacacggctagcgttctttacatttctttcggtagtttggctatccttcaggaggaacaagttaaggaattggcttactttttaaaagacactaacctatcattcctatgggttttgcgagatagtgaattgcaaaagctaccccacaattttgtccaagaaacctcccatagaggtttagtcgtcaactggtgctcccaattgcaagttttatcccaccgcgctgtgtcttgttttgttacccactgtggatggaactctaccttggaagccctttctttgggtgtgccaatggtcgcaatcccacaatgggttgatcaaactacgaacgcaaagttcgttgccgacgtttggagggtcggtgttagagtaaagaagaaagacgaacgtattgtcacaaaggaagagttggaagcttcaatccggcaggttgttcagggtgaaggtagaaatgaatttaaacataatgctataaagtggaaaaagctcgctaaggaggccgttgatgagggtggctcgtctgacaagaatattgaagaatttgtaaagactattgcttaa

SEQ ID NO: 27 - DNA, 1533 bp, Artificial Sequence
  Synthetic
atggccactacgaggcagccacctatggattctccaccccaaaaaccacacttcctgctatttccattcatggcacaaggccatatgataccgatgatcgacttagctaagttgttggctcaaagaggagctattatcaccgtcgttactacaccacacaatgcggccagataccatagtgtgctcgctcgtgcaattgacagcggtttgcacattcacgttttacaattacaatttccttgtaacgaaggtggtttgccagagggttgcgaaaacttcgatttgcttccctcattgggttccgcttccaccttctttagagctacttttttgttatatgaaccatctgaaaaggtattcgaagaattgatcccaagaccaacctgtataatttctgatatgtgtctcccttggactgttagactagctcaaaagtaccatgtcccacgtctggtcttctattcgttgtcttgtttcttccttttgtgtatgagatctttgaaaaataaccaagccttaatctcctcgaagtctgactctgagttggttacattttccgacttgccagatccagtagaatttctaaagtctcagttaccaaaatcaaacgacgaagaaatggctaagttcggttacgaaattggagaagccgatcgccaaagtcacggtgttatcgtcaatgtgttcgaggaaatggaaccgaagtacttggcagaatatagaaaagaaagagaaagcccggagaaggtttggtgcgttggtcctgtctccctctgtaacgacaataagcttgataaggctcaacggggtaacaaagcttctattgacgaaagagagtgtattgaatggttggatgggcagcaaccaagttctgtcgtttacgtcagtctcggttccttgtgcaacttagtcaccgcccaattaatcgaattgggtttgggtttggaagcttcaaacaagccatttatatgggttattcgaaaaggcaatatcactgaggaactacaaaaatggttggttgaatatgatttcgaggaaaagacgaagggtaggggtttagtaatcttgggctgggctccacaagttctgattctaagccatcccgcaatcggttgttttcttacccattgcggatggaatagctctattgaaggtatctccgccggtatgccaatgattacttggcctttgttcgctgatcaggtctttaacgaaaagttgattgttgaaattcttagaatcggtgtaagtgtcggtatggaaacagctatgcactggggtgaggaagaagaaaagggggtcgttgttaagagagaaaaggtgagagaagctatagagcgtgcaatggatggcgacgaaagagaagagaggagagaaagatgtaaggaattggcggaaatggctaagagagccgtggaagagggtggctcttctcacagaaacctgactctgttgaccgaagacattttagttaacggtggtggtcaagaaagaatggatgacgctgacgacttcccaactatcgttaattaa

SEQ ID NO: 28 - DNA, 1173 bp, Artificial Sequence
  Synthetic
atgatgcgttccaccgtgccagcccacatagcttttatgacaattcctgcacatggtcacatcaaccccggattaggtctggtcagggagttggtaagtagaggtcatagagttacgtgtccaactaccgaagaatttggcccaaaggttagaagaactggtgctgaaccagtcttccacacttctgttttgccttcgccatcttcaccgaatcagaaatggccagaagagcttcctgctgttcaagaactcttcctacgagaaactgaaagagtcgttgcgcaattagaagaagcttatgccggggatagaccagacttgatcttgtacgacattgctgcattccaagctcctgtacttgctcatcggtggggtgtcccatacttgcaattgagcccaacccacgttgctttcgaaggtatcgaacaacagtttgatgtccaagccaccccggagttggccaaggttcaagctgaatatgatgcctacttagctagacaaggtgtcgaattagacttcacagcgctaacgaccccaccacgctgcattgttactattcctagatctttccaatacagagctgacactgtatccgatgcttgtacgtttgttggtccattgttgactgaaccagaagagccatggcagcgtcccgatgacagaccagtgttgctgatctctatgggctcagcatataccaaggtcccggaattttacagaacttgtttagctgcgttcggtggtcttgattggcacgtcgttatgtccattggtagaatggttgacccagctgagttgggagaaatcccagacaacgtagaaatacatccatgggttccacaaagagctgttttggctcaagcagatttgttcattacacacgccggtatgggtggtatttgtgaagctctaagccatggtgtgccaatggtcgctgctccacaagctgccgaacaatttgctaatgcagctcgtcttgaggaattgggtttaggacgacaagtcgattccggttctgtttctccggaacaattgagagaaaccgctctagccgtccacgccgaccccgcagttcaccgtagattgagagccgttcgtcaagaaatcgctgaagcgggcggactgcaaagagctgttgaaatcgttgaatctatgttgcctgccgctggttaa

SEQ ID NO: 29 - DNA, 1164 bp, Artificial Sequence
  Synthetic
atggcacatatcgctatggtcggaatacctgctattagccacacgctgccatcattggagattatccgtgaattagttgccagaggtcacagggtaacctacgcgaacggtgcttcgatggctgatgttattaagcccactggcgccgaatttgtgccattcgacagtacattgccagtcgctgataatgactggccagccgatccaatcgctgctatgaccctcttcttggacgatgctatgcaagcactacctcagttaagagcagtttatgacagagatccggctgacttgtacttgtacgatattggtgcctatcccgctagagtccttgcggaaactcaaggtcggccattagttcaattgtcccctacaatagttggttgggaaggttaccatgatgaaatcggcgctcaaattatgtctctaccaggggctgaagcctatcaagaaaaatttgctacttggcttgctgagtccggtgccaccactaccgacccaaacgcattctctggattgccaccaagatgtgtagctttgatacctcgcgcaatgcagccaaatgctgacagagtgaacactgaagtcgttacattcgtcggtccatgccttggtgatagagctgatcaaggtggttgggaaagaccggctggtgccgaaaaggttttgttgatttctctgggttctgcctacacgcgtcaagctaccttttatcgtgaatgtgttgccgctttcggtgagttacccggctggcacgtagttttacaaatcggtaagtacgtcgaccctggtgaattgggtgaaatcccagctaacattgaagttcacaattgggtcccacaattggctattttggaaagagctgacgcgtttatcactcatgctggaatgggtggttccagcgaaggactttactgtggtgtcccaatgattgctgttccacaaggggccgagcagccaatgaacgcggatagattggtggaactcggtgttgcccggagaatcgatacagccgacgcagctgctggtgctttacgcgcagctctgactgaattgactaccgacccagaggtcgcccgtaggtctgctagactaaaagccgaagccagagctgaaggtggtaccggtagagctgctgacctcatagaagatgctttgagataa

SEQ ID NO: 30 - DNA, 1176 bp, Artificial Sequence
  Synthetic
atgcctcgtaccactcacatcgctatggtcggcacgccaatggtatcacatgttttaccaagcttggagattataagagaacttgttagtagggggcaccgggttacttatgcaaatgcggaacccgccgctgctttgattgccccaaccggtgctgaatttgtcagatgcactacaactctgccagtcgtggataacgcttggcctcaggacccagttgcagcttcgtccctattcttggatgacgccatcgctttattgccgcaactacatgcagcttacgatgacgacccagctgatttgtacttgtatgatgtgggagcctacgctgccagagcattagctgaagcccaaggtagagacattgtacaattatctcctacattcgttggttgggatggtgctgaagctgagatcgctgcggcgtttgctggtctaccaggtgctgaagaataccaagcccgtttcgctgcttggttggctggttgtggtgcaagaaccacggatgtcgcggaattttctggcagaccaagacgtgccttggccactattccaagagcaatgcaaccgcacgctgacagagttgacgctgacgctgtcaccttcgttggtccctgtcttggagatagagccgaacaaggtggttggactcgaccagctggggctgagcgtgttttactcgtttccttgggttctgcttataccagacaaccagagttctacagacagtgtgtcgctgcgttcggtgatctaccaggttggcatgtcgtcttgcaaataggtcgctacatcgaccctgctgaattgggttcaactttaccagcgaacatcgaagttagatcttgggtgccacaattggctattctcgaacaggcggatgcttttgtaacacacgccggtatgggcggttcctctgaaggtttgtacgccggtgtgcctatgatcgctgttccacaaggagctgaacaatttttcaacgccgatagacttgtcgaattgggtgttgccagacggttggataccgctgacgctactgctgaagctctgcgtactgccttgaccgaattaaccgctgatccaagagttgcagcacgttctgctgagttgagagctgaagttcgagctgaaggaggggccagaagagccgctgatcttttggaggccagactgggttaa

SEQ ID NO: 31 - DNA, 1209 bp, Artificial Sequence
  Synthetic
atggccaacgtccttgttattaatttccctggtgagggacacataaacccaactttagcaatcgtgagcgaattgattcgtagaggtgaaacagttgtatcctactgcatcgaagattatcgcaagaaaattgaagctaccggtgctcagtttagagttttcgaaaattttctgtctcaaatcaacattatggaaagagtcaacgaagggggctcaccattgatgatgttgtctcatatgatggaggcttcggaaaggatcgttactcaaattgtcgaggaaaccaagggtgaaaagtacgactatttaatatacgataatcacttccccgttggtagaatcattgctaacgtcttgaaactaccaagtgtgtcctcttgtacgaccttcgcctttaaccaatacatcactttcaacgacgaacatgaatccagaaaggttgacgagactaatccattgtatcaatcttgtctggcgggtatggaaaaatggaacaagcaatacggtatgaagtgtaattcgatgtacgatattatgaaccacccaggagacattaccatagtttatacatccaaagaataccaacctcggtctgatgtctttgacgaatcatataagttcgtcggtcccagcattgctactagaaaggaagttggctctttcccgatggaagatttgaaggataagaagctaatatttattagtatgggtaccgtcttcaatgaacagccagaattgtacgaaaagtgttttgaggctttcaaagacgtcgaggctaccgttatcttagttgtaggtaaaaagatcaacatctctcaattcgaaaacattccaaacaactttagattgttcaattacgtgccacaattggaacttctacagtacgccgatgtgttcgtcactcatggtggtatgaatagctcgtctgaagcgctttattatggcgttcctttggtagttatcccggttaccggtgaccaaccattagtcgcaaagagagttagcgaggtaggtgctggtataagattaaatcgtaaggaattgacttccgaatccttgagagaagctgttggtaaagtgaagtacgatgttactttcaaggaaaactctaggaaagttggggaatctcttagaaacgccggtggctataacagagccgtcgacgaaatcttgaagatgaaaatgaatagttactcaaagttgaagtaa

SEQ ID NO: 32 - DNA, 1206 bp, Artificial Sequence
  Synthetic
atggccaatgtcctagtaattaactttcctggtgaaggacatatcaacccgaccttagcaatagtttctgagttgattcagaggggcgaaacagttgtcgcttactgtatcgaagactatagaaaaaagatcgaagctactggggctgaatttcgagctttcgaaaatttcttcagtcaaattaacattatggagcgtgttaacgaaggtggttcccacgtgctgatgttgagccacatgatggaagcctcggaaagaattgttaatcaaatcatcgaagaaacgaagggtgagcaatacgattacatgatatatgataaccattttccagtcggtcgcattatcgctaacgttttgaagcttcccaatatatcttcatgcaccactttcgcctacaatcaatatattgttttcaacgacgaacaagaatccagacaagtcgatgaaaatgacccattgtaccaatcttgtttagctggtatggaacagtggaaaaacagatacggtatggaatgtaactctttgtacgatatcatgaaccacccaggtgatattactatcgtttacacttctaaggagtatcaaccatattcagacgttttcgacgagtcctacaagtttgtcggtccatctattgctaccagaaaagaaatcggttccttccctattgaagacctaaagaacaagaaagttgtatttatatctatgggcacagtttttaatgaacaaccagaattgtacgagaagtgtttcgaagctttcaaagatatcgatgtgattgtaatcctcgtcgtcggaaagaagatgaatatcaaccaattcgaagacattccatataattttaaggtctacaactacgttccacaactggaagttttgaaacataccgatgtgttcgtcactcacggtggtatgaactcaagttccgaagcattatattacggtgttcctttggttgtggttccagtaacgggtgatcagccccttgtcgcgaagagagtggccgaggtcggtgctggaataaggttaaacagaaaagttttgactcctaagttgcttcgtgaagctgttaagaaggttatggacgatgtaacctttaaggaaaagagtcgtaaggtgggtgaaagcttgagagatgcaggtggctataaaaaagccattgaagagatcgaacaattcatgtcgaattatcaaccatcaaaataa

SEQ ID NO: 33 - DNA, 1191 bp, Artificial Sequence
  Synthetic
atggagcagaaacacattgcaatatttaatatcccagctcatggtcacattaaccctaccttagcccttactaagaagttggtcgaacgtggatacagagttacatatccagttacggacgaatttgtggctgctatcgaagaaactggtgctgaacccctccaatacagatcaaccttgaacattaatccacaaactatcagagaaatgatgaagaacaaagaggatatgcctcaagccccaaagatgttcatgaaagaagtcgaagaagttctgccacaattggaagaactataccaacatgataggccggacttgattgtctatgatttcatggctatgacgggtaagttgatcgcggagaagttaggtgttgaagccgtccgattgtgttcgacatacgctcagaatgaacacttccaatttaaggacttagtagaaagaatgcaaatagaaaaagttggccaacaagttagtgatctgaagaacgcaaacttctctaccgctagattcgaagagttatttgaaccagctaaattgaatattgtcttcatgcctagagcttttcagccgtatggtgacactttcgacgaaaggtttagattcgtgggtccatctttggcagagcgcaagttccaaaacaataacgaacaattagttaaggatgacgggcgtccagtcatgttaattagcttgggtaccgcctttaacgcttggtccgaattttactctatgtgcatcgatgccttcagagatacaaaatggcaagttatcatgtccgtcggtgccgctattgatccagaatctttcgaagacataccagacaacttttcgattcggcaaagtgtaccccagttggagattctaaagaaggccaagcttttcattactcacggaggtatgaatagtactatggaagctctgaacgagggtgtgcccttggttgttatcccacaaatgccagaacaagaaatgactgccagacgtgtcgaagaattaggtctaggtagacatttgcaacctgaagctaccactgttcaaagattgcaggaagcggtatcccaagttgacgataacaccgaattgcttaatcgcgtcaaggatatgcaagaaaacattaaagaagctgggggtgctgaaaaggctgctgatgaaatcgaagccttcttcaagccaataactgttaactaa

SEQ ID NO: 34 - DNA, 1203 bp, Artificial Sequence
  Synthetic
atgacaaccagaccagcacacatcgctatgttctctatagccgctcatggtcacgtaaaccctagcattgaagtgatccgtgagctcgttgctagaggccatagggttacgtatgctattcccccagcctttgccgaaaaagtcgctgaaactggtgcagaacctagattgtggcactcaaccttaccaactgatgacgatccagaggcttggggtactgaattgattgacaatatagaaccattccttaccgatgctttgcaagccgaacctcagctagctgcggcttacgaaggagatgaaccagacttggttttatacgacatcactgcttacccagcaagagtcttggctcacagatggggtgtcccgattgttcaactgtcgccaaacttggttgcttgggaaggttatgacgaagaggtcgggaagccattatttgaacccttgaagcaaaccccacgcggtaaggcattctacgatacatttgcccggtggatcgctgagaatggtatggatttatccgttgaagacttcatgggtagaccggatagatgtctagtgttgattcccaaagccttgcaaccaaacgctgacagagtcgacgaaaagagatatacgttcgttggcgcgtgccaaggtgaaccatctgctcagggtgattggcgacgtcctgccgacgctgaaaaagtcctgcttgtttccttgggatcttcttttactaagcaacctgctttctacagagcatgtgtagaggcttttggtggtttaccaggatggcatgttgttttgcaaatcggtagattcgtagatccagccgaactcggtgaagtgccaggtaacgtcgaagttcatccatgggtcccacagttggctattctaagacaagcagacgccttcatcactcacgctggtgctggtggctcccaagagggtttagcaaccggtactccaatggtagctgttccgcaagccgttgatcaattcgggaatgctgatatgttgcaagctttgggtgtcgccagacatcttccgatgacagaagctaccgctgaaaccttgcgtgaagcggtgttagctttggttgaagatccagaagtggctagaagactagctatgatcagagaggaaatggctggcgaaggtggtactggtagggccgcggacctcattgaagctgagctgaggccaaggcaagcctaa

SEQ ID NO: 35 - DNA, 1227 bp, Artificial Sequence
  Synthetic
atgaccactgccaagcccgcacacatcgcgatgttctctattgctgctcatggacacgttaatccatcaatagaagtcattagggagttggtagctcgtggccacagagtgagttacgctatccctgcttcctttgccgaaaaagttgccgaaacaggtgctactccagtcatttatacctcgacgttaccaactgacgatgaaccagaagcttggggtaccgaactgatcgacaaccttgagccgttcttgagagatgctgttcaagcgttgcctcagctagccgctgcttttgaaggtgatgaaccagacttggttctacatgatataacttcttacccagctccagtcttagctcatagatggggtgttccagcaattagcttgtctccaaacttggtcgcctgggaaggttatgaacaagaagtcgccgagcctctgttcgcagatttgaaggcttccgaacgaggtaaggcttactacgcggctttcgccgcttggctcacagagaacggcttaggtgacgatgttgacagatttcaaggtagacctagaagatctatcgttttgattccacgtgccttgcaaccacacgctgacagagttgatacctccgtctatacttttgtaggtgcttgtcaaggagatagaagtgcaacacaaggcacttggcagcgccccgctgctgccggtggtagaaaagttgttttggtcagccttgggtctgctttcaccaagcaaccagcgttctacagggcgtgcattgaagctttcgctgacctgccagactggtacgtggttttacaaatcggtcggtttaccgatgaagccgatttgggtcctgtgccagctaatgttgaagtgcacagatgggtcccacaattagacatcttgcgccaagctgacgcgtttatcactcacgccggtgctggtggttcgcaagaaggcctagctacggcaactcccatggtcgctgttccacaagcagtagatcaattcggtaacgctgatatgctcgtcagtttgggtgttgctcgtcatgtccccatggctgaagcagacgctgctactttgagagaagccgttctgagattagtggccgatccggaggttgccgctagagccgaagccgtcagagcacaaatggctggtgaaggtgggacccgtcaggctgctgacttgattgaggctgccctatctcaaccaggtcccagagttcgtgcttaa

SEQ ID NO: 36 - DNA, 1212 bp, Artificial Sequence
  Synthetic
atgacttctgcaaagcctgcccatatcgctatgttctcaattgctgctccaggtcacgtcaacccatcgatagaggttattagggaacttgtagcaagagggcacagagtgtcttacgccatccccgcttcctttgctggtaaagttgccgaaaccggtgcgacaccagtcgtttggacttccgtcttgccaacggaagacgaaccagaagcttggggaaccgagctaattgataatattgaacctttcctcgatgacgctgttcaagctttgcctcagctggcagcggcctttgaaggtgatgaaccagacttggttctacatgatatcactagctatcccgctggcgttttggctcgtagatggggtgtcccggctatcagtttatctccaaacttagttgcttgggaaggttacgaagaagaggttgccgctccaatgaccgcagaattgcgagcttccgaaagaggtcgtgcatactatgccagattcagagcttggttggacgaaaacggtattgatgaagacgctgatagattcgtcggtcgccctcggagatctatagttttgattccaagagccttgcaaccatacgcggacagagtcgatgagagcgtatacacttttgttggtgcttgtcaaggagacagatctgcaacccaaggtacgtgggaaagaccagcttcagctgaggggagaaaggtgttactcgttagccttggttctacttttacaaagcaacctgccttctatcgtgcttgcatcgaagctttcggtgacttgccagattggcacgtcgtcctgcaaatcggtaaattcactgacgaagctgatttgggcgaagtaccggcgaatgtcgaagttcacagatgggttccacaactagacatcctaagacaggctgatgccttcattactcatgctggtgccggcggttcccaagagggcttggctaccggtaccccaatggtggcggtcccacaagctgttgatcaatttggtaatgccgatatgttggctagtttaggtgtagctcggcatgttcctatgggtgaagctgatgccgctacattgagggaagctgtcttaggattgttagccgacccaggcgtggctgttcgcgccgaagaaataagaactcagatggcagccgaagggggtactagacgagctgctgatttgattgaagctgctctcccacaaggtggttaa

SEQ ID NO: 37 - DNA, 1185 bp, Artificial Sequence
  Synthetic
atggcagataccgcccaaaactcttacagaacgcggccagctcacatcgctttcatgtcgatgcctgcgcatggtcacgttaatccagggcttggtctggtagctgagctagtcgccagaggtcatcgtgttacttatgctactacagacgactttgctccccaggttgcagaagctggagctaccccagtcagatacacttcaaccttgccaggttcctctgccgatgctcaagaatggccggaagaacaagtggccgcgcaagaaatgttcttagaagaaatgatggctgtcgtaccacaattggaacaagcttatgccgcggacagacctgatttaattgtttacgatgttgcaggttttcaggccttggtcttgtccgaaaagtggcaagttccacgtttacaactaagcccaactcacgtctacttcgagggcatagaggaaacatttggtattgaattttctcctgaagctttggctgtccaagctaaatatgatgaatacttcgcgcaacaaggtaccgaattagttttcagagatgttgaaaagtccaacaggtgcgtggttactatcccacgcagtttccagtacttcggtgagagagttagtgactcctacacctttgtcggcccaatgttgacagaaagagctttccaagacgactggcaagctccagactcaagacctgtcttggttatatctcttggttctgcttataataacagagtagaattttatcgtaaatgtttgagggctttcgccgatctcgattggcacgtcgttatgtctgtgggtagatcaactgatccagctgaattaggtgagattcctccaaattttgacgtaagacagtggatcccacaattgagagttctgtcgcaagctagcgcctttattactcatgcagggatgggaggtactatggaaggattgtaccacgaagttcctttgatcgctgttccacaagccgctgaccaattcatgaacgctgcccggattggtgagctccaacttggtacgcaagttgattgtgaatctgtcaccccagaacaattgcgcgccgctttggaacaagtcacgagttccgaggttatccgtttaagactcaaggaaatgagaagagaaattttggaatctggtggtttgagaagagccgctgaaatcgtagaatctcttttataa

SEQ ID NO: 38 - DNA, 1185 bp, Artificial Sequence
  Synthetic
atgagcaagattgtcttcttttccttgccagcccacggccatgttaaccctactttatctctagtgtcacagcttgttaaaaatggacacgagatcatgtactattgtttcgacgcatttaaggataagattgaacaaaccggtgctaaatacatatcttgcgacgattacctgccaatccatatgttcgaagaagctacgacaaacttaccacacattttggctattcccaatatgctcatgtatgtcaccgctaacatgcaatcgaagtgtttggccgaaatcactgactttaacccagattgtatcatacatgattctttggcattgtggggtaggctatacgctgagaaattggggattttacctatttccagtactaccacattcatcttcaacaaggcgatgtctaagcgtattccgttgccacttaagtatctattggctgtaatcccaccaactatcccttccattccaaagtacttaaagttgaccaaacaactgagtaaggactttgaatatggttctctgatggacatgatcatggctaaagaagatgaatacactattacgtacacaagccaattgttgcaatcatacttagaaccgaatccaaagactaaattcgttggtactatgattgatacctccgacatcccagttgaaaagaacaataaacccaagaatatatatatctctttgggtactatcaacaaccaaaacaaaaagttttacaagaattgcttcgaggccttgaagaactatgaagctaacattaccatgagcgttggtaaggaaactgatatatcttcgctcggtgaaattccatctaactttaatgtccagaacttcgtgaatcaattggaagtcctgaagacaaccgacatcttcttgacccacggtggtatgaactccgttaatgaaggtttagccaacggcattccattggttgtcttcccccaacaaccagagcaaaccctcgtagctactcaagtggaaacttttggtgcaggtatccgactcaagaagtcctccattaaggaaattttggtttgtattaatgaaataatggataataaaaaatacgaagaaaaagctagaataattagtcaggaatttaaggacttgggtggagccacttccgctgttcaattcatcgaagatatcctcaacaacaacttataa

SEQ ID NO: 39 - DNA, 1212 bp, Artificial Sequence
  Synthetic
atgatggcaaacgtgctggtcattaatttcccaggagaaggtcacatcaaccctactttagctataatctccgagctaattcgtcgaggtgaaacagttgtttcttactgtatcgaagattatagaaaaaagattgaagctaccggtgccgaatttagagaatttgagaatttcttgtcacagattaacatcatggaaagagtaaacgaagggggctctccattgactatgttgagtcatatgatagaagctagcgaaaggattgttacgcaaatcgtcgaagagactaagggtgaacaatacgactacttactctatgataatcacttcccggttggtagaattattgcgaacgtcttgcaattaccatccatctcttcgtgcaccaccttcgcctttaaccaatacattacatttaatgacgaacaagaatctcggcaggttgatgaaactaacccattgtaccaatcctgtcttgctggcatggagaaatggaatagacaatacggtatgaagtgtaactctatgtatgacataatgaaccatcctggtgatatcaccatcgtttatacatcgaaggaatatcaaccaagatctgacgtcttcgatgaatcatacaaattcgtgggtcccagcattgctactcgcaaggaggtaggttccttcccaatggaagacctaaagggtgaaaagttgatatttatctctatgggcactgtcttcaatgaacaaccagaattgtacgaaaagtgttttgaagcttttaaaggagttgaggcaaccgttattcttgccgtcggtaagaagattaacatatcacaattcgaaaacatcccaaacaatttcaaattatataattacgtgccccaattggaggttcttcaacacgctgacgttttcgtcacgcatggtggtatgaactcctcttcggaagctctatactacggtgtcccgctcgttgttatcccagttactggtgatcagccattggtagcgaagagagttaacgaagtcggtgctgggattagattgaatagaaaagaactcacttcagaattgttaagagaaacagtcaaaaaggtaatgtatgatgtcactttcaaagaaaatagtaggaaggttggagaatctttgcgtaatgccggtggttataagagagctgtcgacgaaatcttcaagatgaagatgaactcctacttgaagctgaagtaa

SEQ ID NO: 40 - DNA, 1245 bp, Artificial Sequence
  Synthetic
atgcatgttgtagtcgtgactatcggatccgctggcgacttgtttcctttcctttggatggggaggacattgcgcgcccgtggtcaccgagttgatttcctagctcccgtccagcacgaaccatgggttagacaagcaggtttagattttcatggtctgccagctgacccagctgttttagatcacccggacttgtggcacccaaccagaggtttggccgtggtctggaaggcgacgcggccagctatgatagaggttcctaccttcgttgatgcattggatcccgatgaaccaagaattttattggtccatccacttgctctcccagaagcccaattgtgcagagacactcaaccactgatgaaaattgctgctgcttacctagctccttcaaacttgcctactgtccacgacccattgttgcttggtccatggagagtaccaccatgggttccgcatcctgttcgtagacttttatggagaggtctagccgctgccttgatcgatccagttgcattaccggacgtcaatgctgccagagctgctgccggtcaaccaccagttaagaacttgattagatatttgtctcacatcccagatttgtcgattaccttatttcctgaatggttcgccccaactcaaccagactggcctagaccattgctgagatgtggttttccattatacgaccccgctcctgatgcggctccatctccagctttagaggcattcttggctagcggggaaaggccagtcgtcttcacccctggtactggcaatagacaagctcgaagatattttgaagatgctgcttctgccgcaagagaattgggtttgcgtgcggtcttcttgacaccatacagagaacagctgccggaggttttaccagccggtaccctctggcaagactacgttccattgagatccttgttgccacaagctgcggctcttgtccaccatggtggtatcggtactactgctgaagctctaagagcaggtaccccacaattagtagtaccattggcacatgatcaattcgataacgctgctcgtgttgaagctttgggtgttggaatgagtctccatgctagaagattaaacgctgctaggttgacgcaggcgttgcgcgaattacttggtagagaagcccctgcgaggagagcctcagaagttgctgctagattggccgccccacccgacgccactgctttatgtcttagactcgaatttttgctaagtgcttaa

SEQ ID NO: 41 - DNA, 1446 bp, Artificial Sequence
  Synthetic
atgatccctatgattgatttggccaagctattagctcagaggggtgcgataattactgttagcacaacgccccataatgcagctcgttatcactcagtgttggctagagctatcgactctggactccacattcatgtcttgcaattaagatttccatgcaaagagggtggccttccagaaggttgtgaaaacatcgatttgttgccatcgcactactccccattcaccttcttttccgccactttcttattatacgaaccaagtgaaaaggtcttcgaagaactgatacctcgaccaacctgtattatctctgacatttctttgccgtggactatcagattggctcacaaatatcatgttccaagattagttttttactctttgtcctgttttttcttgctgtgtatgagaagtttgcggaacaatcaagcattgatttcatctaagtctgattctgagctagtaactttctccgacttgccagaccctgttgaatttttgaagtcgcaactgccaaaatctaacgatgaagaaatggctaagttcggttatgagataggtgaagctgatagacaatcccacggggtcatcgtcaacgttttcgaagaaatggaaccaaagcatcttgccgaataccgcaaggagagagaatcgccagaaaaagtgtggtgcgtcggtcctgtttcattatgttacgacaacaagttggataaagcccaaagaggtaacaaggcgagtattgacgaaagagaatgtattgagtggctcgatggtcaacaaccctctagcgttgtgtacgtttccctcggttctcagtgcaatttggttacagctcaacttatcgaattgggcttaggtttggaagcttcaaagaagccgtttatttgggttataagaaaagccatcatcaccgaagagttgcaaaaatggcttgtcgaatacgacttcgaagagaagaccaagggtcgttcattgttgattcgaggatgggctccacaggtcttgattttatcccatccagctcttggttgttttctgacacactgtggttggaatagctctatcgaaggtatttctgctggcgtgccaatggtaactctacctctgttcggtgatcaaatattcaacgaaacgttgattgttcaaatcttaaggattggtgtccgcgttggtgtcgaagcagctatgcagtgtggagaagaggaagaaatcgaccgtggtgttgtagttcgtagagaaaaagtgagagaagcgatcggtatagtcatggacggtgatgagcgtgaagggagaagagaaagatgcaaggaattagcagaaaccgctaagagagctgtcgaagaaggtggtagttcccaccaaaacttaactagactgatcgaagacattgcttcgtctttgaggagattgtccgaatggaagttctatttgattataatctcataa

SEQ ID NO: 42 - DNA, 1383 bp, Artificial Sequence
  Synthetic
atggatgagacaaccgttaaaggtggcagacgtgcgagtgacgtcgtagtttttgccttccctagacacgggcatatgtctccaatgttacaattctccaagagattggtcagcaagggtctacgcgtgacgtttctcattactacttctgctaccgaatcactgagacttaacttgccaccctcttcctcgttggatttgcaggtcatatcagacgttccagaatctaatgatatcgcaactttagaaggttatttgaggtccttcaaggctaccgtttctaaaactctagccgacttcattgatggtatcggaaacccgccaaagtttattgtttacgactccgttatgccatgggtccaagaagtcgctggtggtagaggtttagatgctgctccattctttacccaatctagcgccgtgaaccacatcttgtaccatgtttatggtggatcgttaagtattcctgctcctgaaaatacagctgtcagcttgccatctatgccagttttgcaagcggaggacttgccagctttccctgacgatccagaagtagtcatgaattttatgacttcacaattctccaacttccaggatgctaagtggatattttttaacacgttcgaccaacttgaatgtaaaaagcaaagtcaagttgttaattggatggcagatagatggccgatcaagactgtgggtccaactattccctcggcctacttggatgacggttggctggaagatgacagagctttcggtttgaacctcttaaaaccagatgacgggaagaacacccgtcaatggcaatggttggattccaaggacaccgcttctgtactatacatttccttcggctctttggcaatcttgcaagaagaacaagtcaaggagttagcatatttcctgaaagatactaatttgagtttcctttgggttttgcgggattcagaattgcaaaagctaccacacaactttgttcaggaaacctctcatagaggtcttgttgttaactggtgcagtcaattgcaagtcttatctcacagagccgtcagctgttttgtcacacactgtggttggaatagcacgttggaagctctatccctaggtgtaccgatggttgctattccacaatgggttgaccagactaccaacgctaagtttgttgctgacgtgtggagggtgggtgttagagtaaaaaagaaggacgaaagaatcgtcactaaggaggaactcgaagcctctattagacaagttgtccaaggtgagggtagaaatgaatttaagcataatgccatcaaatggaagaacttggctaaagaagctgttgatgaaggaggttcttctgataagaacatagaggaatttgtgaagactatcgcgtaa

SEQ ID NO: 43 - DNA, 1467 bp, Artificial Sequence
  Synthetic
atgagttcacaggaacaaggtccacacttcgtgttgtttcctctaatggcacaaggacatatgatcccaatgatggacattgctaaattacttgtccaccatgctgttactgttacagtagttaccactccaaggaacgccgcgcgcttcacgcccatatttgatcgttatgtcgggtctggcttgccgattagattggctcaactgccattcccatgcgaggaagtcggtttgcctgaaggttgtgaaaatatcgatatgattccatccttaggtaccgccagaaccttctttgaagctactaacttgttgcaccaaccagctgaaaagcttttcggtgagttctctccaccacctagctgtatcatatcggacatgtgtttaccgtacacttctcatattgcaaagaaatttaatatcccaagaatttccttcgttggtgtttcttgtttttgtttgctctgccaccacacaatcttggtcaacaacgttagagaaaacattgcttctgattcggagtactttgtcttacccggtataccagacaagatcgaaatgaccatggaacaatccggtgtaactttgaatgaaacgtgggaacaattcagagaagatatcatgggtgctgagatggccacttacggtgttattatgaatagcttcgaagaactagaaccagaatatgctagagaatacaagaaggtgaaggatgacaaagtgtggtgtattggaccggtttcattgatcaacaaggatcatttagacaaagcccagagaggtcgtgcttctgtcgatgaatccgaacatatgaagtggctggattgccaaaaagctggttccgttatttacgcttgtctgggttctttgtgtaacttaaccgcccctcaattgatcgaattgggtcttgcattggaggctagtgaaagaccattcatatgggtaattcgggagggcaagcactctgaaccactagaaaagtggatcgaagaaaacggtttcgaagaaagaaccagtagcagatccttggtcattcgtgggtggtccccgcaacttttgatactgtctcatccagcaatcggagggtttattactcactgcggttggaactctattttagaagccatctgtgctggtgttccaatgatcacttggccactatttgctgaccagtttctaaatgagagtttggtcgttaaggttctcaaggttggtgtaaaggtcggtgtggaaactcctatgatatggggtaaggaagaagaagttggagtcgaagtaaaaaaggaagaaattgaaagggccatcgctgagatcatgaatgagacatctgagtccgaagaaagaagagaaagagttagagaattgggcgaaatggctcaaagggcggtcgaaaagggtggttcaagtcactctaacgtttccttcttgattcaaaacataatgcaaaaaaacaatggtgttaccccataa

SEQ ID NO: 44 - DNA, 1491 bp, Artificial Sequence
  Synthetic
atggaatcccaacagttaaacattgtcttcttgccttatcccactccaggtcatatgatcccaatgatagataccgctcgtctgtttgcgaagcacggggccaatgttacaattatcactacccacgctaacgtatcatcgttccaaaaagctattgactctgattttagcgcaggtcattctatcaagacgcaattgatacaattcccatctgctcaagttggtctaccagacggcgtggagaatattaaggatggtacttctcttgaaatgttgggaaaaatcaccagaggtatttggatgttgcaggaccaaatagaaatcttatttcaagacttggaaccggattgtattgtcacagacatgatgtacccatggactgttcaatgcgccgcaaaactcggcatcccaagattgcacttctactcctccagttacttctctaactgtgcttgtcactttattagaaagtgcaagccacatgaaggtctggtcagtgatactaacaagttcaccatccctggtttgcctcactcaattcaaatgactaccttacaactcccagactggatgcgcaacaagtcgttcgctactggatattttgaagagatgtttgaatctgaagaaagatcctacggtacaatttgtaattctttccatgaattggagagcgattatgaaaagctatgtaagaccattatgggtataaaatgttggtcaatcggtccagtttctgcctgggctaacaaagacgatgatgaaaagaaagctaatagaggtcatatggaaatcaataacattggtaatgaacaagaatggcttaactggttaaactcgaagccaaatgatagtgttttgtacgtgtctttcggttctttgacgaggctaccacacttacatctggtcgaaatcgcccacggattagagaactcaggtcacaacttcatctgggttgtcagaaagaaagaccgagatgagggtggcaacggttttttgcaagaatttgaaaagcgtatgaaggaatccgataagggctacataatttggaattgggcgccacagttgttaatcttggatcatcccgctactggtggtattgttactcactgtggttggaactcaatccttgagtccttgaatgctgggttgcctatgattgcatggccagtattcgctgaacaattctataacgaaaagttggttaccgaaatattgaagattggtgttccagtcggtgtgaaggaaaacaagctctgggcttcttttggtgaagaagccattgtcagatcagaggaaatcgttaaagctgtagaaatcttgatgggttctggtcaagactccaaggagatgcggatgagagccaagatgcttggtgatgctgcgaagagaactatcgaagaaggtgggcattcctacaacaatttgattcaactcattgacgaattgaaaagtttaaaaaagtccaaagcccttgcagttaaagaagattaa

SEQ ID NO: 45 - DNA, 1332 bp, Artificial Sequence
  Synthetic
atggataatatgcaaaggccgatcaaagtacttatgttgccctggctcgcccatgggcacgtttccccttacctggagctagcaaagcgattatcgacgagaaacttccatatatatttgtgcagtaccccagtcaatctatcttctattaaacctaagattagcgaaaaatattcatctagcattgaattagtggaattacatttgccatcattaccggacctcccacctcactaccatactacaaagggacttcctccacaccttatgaacacattgaaagcggcttttgatatggcttcccccggttttggcgacatcgttacttcactaggtccggatctgttaatacatgagttcttgcagccatgggcagccgaagtggctaaaagtcacggtttaccaagtgtagttctgtttaatgtaggagcaggcactatatcctttatgttccatatgattaagaacacgggtaataagtttcctttcgaagcgattcgtttgcatgattatgaactagccaaaatccgcaaggcagctgacgattctacagctagagtcaatgagaaagatcgtgttctacaatcagtggaaagatcctctaacttcatactgttgaagacctttagggagatggacggtaaatacatggattatcttagctcattattaggaaaaaaggttttgacagtcggacccctggttgaagatccctctaatactgaagatggggattcgattatagaatggctggacaaaagagagaaatcctctactatcttcgtgtcatttggtaccgaatactttctaacagaaaaggaaagagaagagattgcacatggccttgagttatctaacgtaaattttatctgggtcattaggttctctgttgaagagagtgtcgaattaaaggaagcccttcccaaaggtttcttggaacgcgttcgggacagaggcctagtgatcgatgggtgggctcctcaaggtaaaatattagaacacccaagcattggaggttttgtgtcacattgtgggtggggcagcattatggagtcgatgaaatcaggtgttcctataatcgcaatgccaatgcagcacgaccaaccgttgaacgcgcgtatggtagaagaagttggtgtcgctatggaagtaaaaagaaataagtcaggagaattggagagactggagatagccaaggttattaaacatgtcgtagcagaaaaagacggtgatagcgttaggaagaaaactaaagagatgagtgattcaattagaaacaagggtgaggaagaactggacgaagtcgctgaggcattggttcaactctgttaa

SEQ ID NO: 46 - skipped

SEQ ID NO: 47 - DNA, 1323 bp, Artificial Sequence
  Synthetic
atggaaaccaaaaagaatacgataagcgtattgatgcttccatggctggctcatgggcacatcagtccttttctcgagctagccaaaaagttagcgaaccgaaatttccatatttacttgtgttcgactccggtgaacttatcttctattaaaaagggtgttgcacaaaaatattcccagtcaatcgaattagtcgaattgcatttaccctcactccctaatctaccaccacactatcatacaactaacggcttgccccctcacctgatgaatacattaaaaactgcttacgagacagttgcaccgagtttttctaagcttcttcaaaccttgaacccagacttggtaatatatgattacaatcaaccttgggccgcagattccgctacttcagttaatattcccgcggtccagttccttaccttttccgctgccgttatcgcactaggaatacatatgtatgacaatcctggtgaaatgttcccatttcctgaaatttacttatccgagtatgaaaggctcagcttggataaggctctgcaaggtggaaaattcccatttgatgaaggcctgcgtcgcagtcaggacatcattttaatgaaaacgtgcagagattttgaggggaaatacatggattatctgtcaagtttagtgagcaaaaagattgttccagtcggtactttggtacaagaatctacaaacaaagatgatcatgaagaaataatgcaatggctagacaaaaaggacaaaagatcaaccgtatttgtgagcttcggctccgaatatttcctgtctaaagaggaaattcacgaggttgccgagggtttggaaagaggaaaggtcaactttatatgggttataaggtttccgcaaggtgaaagaatctctattcgagatgcgcttccagaagggtttttggaactcgttggtgaacgcggtatggtaatggaaggatgggctccacaggcaacgatccttcaacacgcttcgattggtggtttcatgtcgcattgtggctggtctagcttcacagagtcgatgaagttcggagtccctataattgcaatgcccatgcatattgaccagcctatgaatgcaagattggtggaatacatggatatgggcgtagaagcggttcgtgatgaaaatggtaagttacaaagggaggaaattgctaaagctattcgtaaagtcgtcgtggaagagtcgggcgaagttgtccggaaaaaggccaaggagctcagtgaaaaaatgaacgctaaaggtgacgaggagatagatggggtggttgaagagttagtggcactctgtaacaataagtaa

SEQ ID NO: 48 - DNA, 1368 bp, Artificial Sequence
  Synthetic
atggctacagaggttacgaagtatcctagtactctgaaagtcctaatgttcccatggttggcgtacggtcacataagcccctttcttaacttagccaaaaagttagcagataggggctttttgatctatttctgctcaactccgattaatattaagtctataattaaaaaaatccctgaaaaatactgtgactccatagaactcgtagaactgcatttgcaggaattaccagagctaccacctcattatcatacaaccaatgggttaccaccgcaccttaaccataccttgcaaaaagcaatgaagatgtttaagcccaatttcgtgaagattttgcaaaacttaaaaccagatcttgttatttacgacatcgtgcagcaatgggctgaacgtgccgccaatgagcaaaacatacctaccgtaaaactgatcccctcgggtgcggttgctgtcacatatttttttaatctggcaaacaagttaggagttgattacccattttctgctatttatctaagaaaaattgaacaagtaaaaatgtcagaaactttcgcaaaacacgccgaaggtaaagaagatgatgacgtcgacccattcgctaatgggaatatgcagatcgtgctcgttagcacgtctaggatattggaggcgaagtatatcgattactgtactgaacttatgaattggagagctgtccctgttggcccgcctgttcaagatccaatgtataatgatgacgcagacgaagtagagttaattgattggcttggaaagaaaggtgaaaacagtacagtatttgtatcgtttggtacagagtatttcctctccagagaagatcgcgaggaaatagcattcggcttggaattgtcaaatgtgaatttcatttgggttgtcagatatcctaacggagaagaacagaatctcgaggatgtccttccaaaaggttttttagaacgaattggtgataggggaagagttctaaacaagtttgctccgcaatcacgtatactcaatcatcctactacgggtggttttgtctctcactgtgggtggaatagtgttatggaatctatagattttggagttccaattatcgccatgcccgtgcatttggatcaacctatgaatgctaggttaatggtcgagttacaagtggctgtggaaatcgttcgcgacgacgatgacaagattcacagaggggaaatagccgagacattgaaaggcgtagtaaccggtaaaattggcgagaacttgagagcgaagattagagacatttccgagaacctgaagtcaactagaggagaagaaatggatgctgctgcaaacgaattgattcaattatgcaaaaacagcaataaatgtaaataa

SEQ ID NO: 49 - DNA, 1359 bp, Artificial Sequence
  Synthetic
atggaatcgctagcaacaaatcataagactttacacgtcctgatgttcccctggcttgctcatggacacattagtccttacgtggagttagccaaaaggttgaccaaaagaaactttatcatacatctctgttcaacgccagcgaatttgagctctattaagcacaaaataggggaaaagtatgctctttccatccatttggtagagctacatttaccaacattgccgaaattacctccatgccaccatactaccaacggccttccgccagacttgatgcctattctaaaactggcatttgaaatgtctaaacccaatttcaaccgcatcctcgaaactattcgtcctgatctccttatatatgattttttacaaccatgggccccattggctgcgtcaagatacggtattcccgcagttgaatttataacctctagttcaacaatgactgcttatatgttccacttttttttacgaccaaatttagagttcccttttgaaaatatctcctaccgtgattatgaactggttcatagagcaaacttattaccattggacgaaaggattaagagagatgcctttgaaggtatacatagatcgaataacattatcttgattaagggtttcagggagatcgaatctaaatactcggactatttatcaactatgctaggaaaaaagatagtgcctgtaggccccttggttcaggatcctattcaagaatttgaagatccccttgagatcattaaatggttggacaagaagccaaaaaatagcacggtcttcgttagtttcggttccgagtattttttaaaacaagaagaaacacaggaattggctcatggtttagagctaagtaacataaatttcatttgggtagtgagatttcctaaaggtgaaaagcgaactctggagcaagttttaccatctggctttctggagcgtgtgagagatcggggactggtattagaagggtgggccccacaagctcaaatcctagggcatgaaaatatcggtggcttcgttagccactgtggttgctcctcaatgatggagtcaatgaaatttggggtccctattatagcaatgccgatgcatttggatcagccactcaacgcccgcctactcgaagaaataggcgtgggagttgaggtcgtccggaatggactgggtagactggataaagaagaagtagcagcagttattagaagggtagttgcggaagacggtggtgagggagtgcggagaaatgctaaactaatgtctgaaaagattaaggaaaagggtgatgaggagattgatgaagtagttgaagaatttgttaagttatgtaaaaaaaaaggcaatggttttcactaa

SEQ ID NO: 50 - DNA, 1452 bp, Artificial Sequence
  Synthetic
atgatgatgaacaattacgggcgcaagcgtacagtgctgatgttcccgtggctaggacatggccacatatctccctttttggagcttgctaaaaaattaagtaatactaacctctttaatatctatttgtgctccacccctgcaaacttaaagtcagtcaaaaagacgttgaaaaatgaatgtgatagcccatcaattaggttaattgaacttcatttgccaactctacctgacttgccaccgcatttacacacaactaatggtctacctctccatttaatgcccaccctgaagcaagccttcgatatgtctagcccaagattttctcgaatcttaaaaaccttgagtccagacctacttatatatgatatgattcagtcatgggcgcctgtatcggctgccgcactaggtattccgagtgttgtttttgtcacaacttccgcgacgatggccgctactatgttccacttgtacctgaattattctaaaggcatcgcttttccattcagaacaatatactttagaacatatgaatacaagcatgttcacgaaattcttgagtcttcagcaaacaacaggaaggataaagaccgtgtgatggagtgtgtaggtaatagctcgtcaatagttctagtcaagtcattcaaagaaatcgaatctaaatatgcagattatttatccacactgaccggaaagaaaattgtaccagttggtcccttggtggttgacccctgtcatgcagatagtaaacaagatagtgtaattcaatggttggatacgaaagacacggggtccacagtcttcgtgtcgtttggttctgaatactttctcagtagcgctgatttagaggaaatagcctatggcttggaaatgtcaaatgttaactttatttgggtattaagatttccgaagtgcgaaaccaaagtccagctgtctcaacatttacctcttggattcctggagagagttaaggataggggtcttttggtggaaggttgggcccctcagaccaagattctaggacataaaaacataggcggctttgtgtcacactgcggttggaatagcgttatggaggctatgaaatttggggtaccaataatagctatgcctatgcaactcgaccaaccagtcaatgcaagactggccgtagaagttggtgtgggcgttgaggtggttcgggatggaaatggtcgcttgatgagagaaaaagtcgcagcggtggttcaacgggtcgtagtttcggaattaggggcttgtgtcagagaaaaagccaagaagatgtccgttggacttagggaaaagggtgaagaagaaatcgacgtggttgtagacgagctcttaaaactctgtcagtgtggtggtagccgtggaggcagaaaagggctaccaaaaactaagtctgagacattcgctattgatatgtactgcgcggtagaaactgaagtctaa

SEQ ID NO: 51 - DNA, 1365 bp, Artificial Sequence
  Synthetic
atggatgggtcgaatgagaagagcatcagggtgcttatgtttccttggctgggtcatggccacatttcccccttctttgaactagctaaaaaattagttaagcgtaacttcacgatatttttggtcagtaccccagcaaatttcatttcaataaaacaaaaactcattcatgaaaacttatgtgacaagatccacttgtttgatttgcgattaccatctctccctgacctaccgccacattatcatactacaaatggattgccaccccatttaatgtcaacactgaaaaaggccttcgcgaagtctcgccctatatttactcagattatgaacaccattgagcccgatcttctgctctacgatttgctccaaccgtgggctccaaaagttgctaaagaaaagaatatacctagtgtagttttcgtgacttcctcagcaacaatgttttcttatatgttccacaattttagatacccaaactctcaatttcccttttcaagtatctattacagagactatgaactgactagattgattaagaatcaggaaatggaaaccatcgagcaacatcaaagggataacaaatctgtaaagatgtgcttcaaaaggtcgacaaatatagtcctaattaaaggttttaaagaaattgacggtcagtactgtgaatacatctccagcttaacgaagaagagagttgtgcctgttggaccattagtacaagagcaaacctcggaagataataattcccaaattctaacttggcttaaccaaaaatccaaaggctctacgattttcgtaagctttggttcagaatattttttaagccaggaggatagagaagaaatcgcccacggcctcgagcaatctcgtgtcaatttcatatgggtggtcagatttcctaaaggggagaagttgaaattagaacaagcgttaccgcgggatttttttaagaaagtaggtgaacgcggaatggttgttgaagactgggcacctcaggctaaaattctaggtaacccaaacataggaggtttcgtaagtcattgcggctggaactcggttttggaatctatgaagattggggtgccaattatagccatgccaatgcatttggaccagcccttgaatgccagacttgtagaagaggtgggaattggtcttgaagttgtcagggataaggatggtaaactagacggtgaacaaatatcagaaatcataaataaggttgttttagagaaagagggcgaatctatccgagaaaaagcaaagaagatgagtgagactataagagtgaaaggagatgaggaaatcgacgatgttgtccaagaactggttaacttgtgtaaaacaagatcgaatgttgtttaa

SEQ ID NO: 52 - DNA, 1371 bp, Artificial Sequence
  Synthetic
atggtgtatagcgaccaacgaaagctgaccatacttatgttgccttggctcgctcacggtcatatctcgccgtacttagagttagccaaaaaattgacgacaaagagaaactttcatattttcatttgctctactccagtcaatctttcaagtataaaacccaagttgtctcagaaatattcccactgtattgaatttgttgaactacatttaccacacgatgatttgcctgagctaccaccgcattaccataccactaatggattacctccgcacttgatgagcacactcaagagggcattcgacatgtcaagtaacaatttttccaatatcctaaaaacactttctccagatctgttaatttatgatttcttacaaccctgggcgccatcacttgcttccttgcaaaactttccctctattgaatttataacgatgggcgcagcctttacttcgttcagtatccagcatctcaaaaaccctagtgtaaaattcccatttcctagcatctacttgcaagactatgaagctgaaaagttcaataacgttctggagtcgtctgcaaatggtataaaagatggggatagagtgcaacaatgttcagctcgttcttgcaatattattttagttaagacatcgagaggtattgaagaaaagtacatcgactatttgagtgatttaatgggaaaaaaaattgtcccagtaggcactttggtccaggaacccgttgaccaaaaggtagatgaggagacatggataatgaaatggctcaataagatggaacgctcatccgttgtttatgtgtgttttggttctgaatacttcctgtcgaaggaacagatcgaagagattgcgcatggattggaactatcaaaagtctcctttatatgggtgattagattctccaaagaagagaaaaacaccagggtagaggaagtattgccagagggttttctgcaaagagttggtgaaaaaggcgtcataatggaagggtgggcccctcaagcaaagatactacagcattcttcagttggaggttttgttagccactgtggctggaactctgttttagaatcaatcaaattcggtgtgcccataatcgctatgccaatgcatttagatcagcctattaatgctcgcttggtagaagaagttggggttggtgtggaagtaaagcgtactggtgaaggctctcttcaacgggaagaagtagccaaggtcatcagagatgtattcgtggagaaaattggtgaaggagtccgaaaaaaagctcttaaaattagggacaatatgaataagaaggaggatgaagagattgacggggtagtggaagaactaatgcaagtttgcaccggtcgggaatcaaagtaa

SEQ ID NO: 53 - DNA, 1356 bp, Artificial Sequence
  Synthetic
atggtctatagcgagaggagaacgctcacaatcctgatgctaccgtggttagcgcatggtcacatatccccttttcttgaattggctaagaaattaacttcaaaacgcaacttccatatttttatttgttcgacccccgtgaatttgacaagtataaagccaaaactttctccaaagtactctcactgcatcgaatttgttgaattacatttgcctcatgacgatctaccagagttgccgcctcaatatcacactaccaatggactacccccacatttaatgtcaacattaaaacgtgcattcgatatgagttccaacaatttttctactattttgactgccctgaaaccagacctgttaatttacgatttcttacagccttgggctcccagcctggcatcgttgcaaaatataccaagtgtagaatttattacaacttcagctgccctgacgtctttctcagttcaccatctaagaaaccctatcgataaatttccgttcccatccatttatctccgagactatgaagcaaagaaattcaataaccttttggaatcatccagcaatgggataaaggatggtgatagagtcctccaatgttctgacctatccagtggcatcatccttgtgaagacctctagggagattgaagcgaaatacgttgattatttgagtggtttaatgggaaagaaaatagtaccagttggcccattagtccaggaacctatggatctgaaggtggacgaggagacttggataatgaaatggctcaataaaagggaaagatcatctgtagtttacgtttgttttggatcggaatactttttgtcaagagaacaaattgaagagttagcccatggtttggaattgtctaaagtgagctttatttgggttatccgttttcccaaagaggaaaagggtaacagagtagaagaagtcctacctgaagcattcctagagcgcgttggggagaaaggggtaattgtggagggctgggctccacaggcaaagatcctaaatcactcgtcagttggtggttttgtttctcattgcggttggtcatctgtgttggaaagcattaaattcggagtgccaataatcgctatgccgatgcacttagatcaacccattaattccaggttagttgaagaagtcggcgtcggtgtcgaagtaaagagaacagctgagggatcattggagcgaaaagaagtggccaaagcaattagagatgtcgttgctaagaaaataggtgaaggtgtacggaagaaagcgctagagatccgtgataatatgaaaaacaaggaagacgaagaaatcaacggggtagttgaggaattaatgcaattatgtacctaa

SEQ ID NO: 54-55 - skipped (2 entries)

SEQ ID NO: 56 - DNA, 696 bp, Artificial Sequence
  Synthetic
atggctcaatccaaacatggtttgaccaaagaaatgaccatgaagtacagaatggaaggttgtgttgatggtcacaagttcgttattactggtgaaggtattggttacccattcaaaggtaagcaagctatcaacttgtgtgttgttgaaggtggtccattgccatttgctgaagatattttgtctgctgctttcatgtacggtaacagagtttttactgaatacccacaagatatcgccgactactttaagaattcatgtccagctggttacacctgggatagatcttttttgtttgaagatggtgctgtctgtatctgcaacgctgatattactgtttccgttgaagaaaactgcatgtaccacgaatctaagttctacggtgttaattttccagctgatggtccagttatgaagaagatgactgataattgggaaccatcctgcgaaaagattattccagttccaaagcaaggtatcttgaagggtgatgtttctatgtacttgttattgaaggacggtggtagattgagatgtcaattcgatactgtttacaaggccaagtctgttccaagaaaaatgcctgattggcatttcatccaacataagttgaccagagaagatagatccgatgccaaaaatcaaaagtggcatttgaccgaacatgctattgcttcaggttctgctttgccataa

SEQ ID NO: 57 - DNA, 6624 bp, Artificial Sequence
  Synthetic
tcgcgcgtttcggtgatgacggtgaaaacctctgacacatgcagctcccggagacggtcacagcttgtctgtaagcggatgccgggagcagacaagcccgtcagggcgcgtcagcgggtgttggcgggtgtcggggctggcttaactatgcggcatcagagcagattgtactgagagtgcaccataccaccttttcaattcatcattttttttttattcttttttttgatttcggtttccttgaaatttttttgattcggtaatctccgaacagaaggaagaacgaaggaaggagcacagacttagattggtatatatacgcatatgtagtgttgaagaaacatgaaattgcccagtattcttaacccaactgcacagaacaaaaacctgcaggaaacgaagataaatcatgtcgaaagctacatataaggaacgtgctgctactcatcctagtcctgttgctgccaagctatttaatatcatgcacgaaaagcaaacaaacttgtgtgcttcattggatgttcgtaccaccaaggaattactggagttagttgaagcattaggtcccaaaatttgtttactaaaaacacatgtggatatcttgactgatttttccatggagggcacagttaagccgctaaaggcattatccgccaagtacaattttttactcttcgaagacagaaaatttgctgacattggtaatacagtcaaattgcagtactctgcgggtgtatacagaatagcagaatgggcagacattacgaatgcacacggtgtggtgggcccaggtattgttagcggtttgaagcaggcggcagaagaagtaacaaaggaacctagaggccttttgatgttagcagaattgtcatgcaagggctccctatctactggagaatatactaagggtactgttgacattgcgaagagcgacaaagattttgttatcggctttattgctcaaagagacatgggtggaagagatgaaggttacgattggttgattatgacacccggtgtgggtttagatgacaagggagacgcattgggtcaacagtatagaaccgtggatgatgtggtctctacaggatctgacattattattgttggaagaggactatttgcaaagggaagggatgctaaggtagagggtgaacgttacagaaaagcaggctgggaagcatatttgagaagatgcggccagcaaaactaaaaaactgtattataagtaaatgcatgtatactaaactcacaaattagagcttcaatttaattatatcagttattaccctatgcggtgtgaaataccgcacagatgcgtaaggagaaaataccgcatcaggaaattgtaagcgttaatattttgttaaaattcgcgttaaatttttgttaaatcagctcattttttaaccaataggccgaaatcggcaaaatcccttataaatcaaaagaatagaccgagatagggttgagtgttgttccagtttggaacaagagtccactattaaagaacgtggactccaacgtcaaagggcgaaaaaccgtctatcagggcgatggcccactacgtgaaccatcaccctaatcaagttttttggggtcgaggtgccgtaaagcactaaatcggaaccctaaagggagcccccgatttagagcttgacggggaaagccggcgaacgtggcgagaaaggaagggaagaaagcgaaaggagcgggcgctagggcgctggcaagtgtagcggtcacgctgcgcgtaaccaccacacccgccgcgcttaatgcgccgctacagggcgcgtccattcgccattcaggctgcgcaactgttgggaagggcgatcggtgcgggcctcttcgctattacgccagctgaattggagcgacctcatgctatacctgagaaagcaacctgacctacaggaaagagttactcaagaataagaattttcgttttaaaacctaagagtcactttaaaatttgtatacacttattttttttataacttatttaataataaaaatcataaatcataagaaattcgcttatttagaagtgtcaacaacgtatctaccaacgatttgacccttttccatcttttcgtaaatttctggcaaggtagacaagccgacaaccttgattggagacttgaccaaacctctggcgaagaattgttaattaagagctcagatcttatcgtcgtcatccttgtaatccatcgatactagtgcggccgccctttagtgagggttgaattcgaattttcaaaaattcttactttttttttggatggacgcaaagaagtttaataatcatattacatggcattaccaccatatacatatccatatacatatccatatctaatcttacttatatgttgtggaaatgtaaagagccccattatcttagcctaaaaaaaccttctctttggaactttcagtaatacgcttaactgctcattgctatattgaagtacggattagaagccgccgagcgggtgacagccctccgaaggaagactctcctccgtgcgtcctcgtcttcaccggtcgcgttcctgaaacgcagatgtgcctcgcgccgcactgctccgaacaataaagattctacaatactagcttttatggttatgaagaggaaaaattggcagtaacctggccccacaaaccttcaaatgaacgaatcaaattaacaaccataggatgataatgcgattagttttttagccttatttctggggtaattaatcagcgaagcgatgatttttgatctattaacagatatataaatgcaaaaactgcataaccactttaactaatactttcaacattttcggtttgtattacttcttattcaaatgtaataaaagtatcaacaaaaaattgttaatatacctctatactttaacgtcaaggagaaaaaaccccggatccgtaatacgactcactatagggcccgggcgtcgacatggaacagaagttgatttccgaagaagacctcgagtaagcttggtaccgcggctagctaagatccgctctaaccgaaaaggaaggagttagacaacctgaagtctaggtccctatttatttttttatagttatgttagtattaagaacgttatttatatttcaaatttttcttttttttctgtacagacgcgtgtacgcatgtaacattatactgaaaaccttgcttgagaaggttttgggacgctcgaagatccagctgcattaatgaatcggccaacgcgcggggagaggcggtttgcgtattgggcgctcttccgcttcctcgctcactgactcgctgcgctcggtcgttcggctgcggcgagcggtatcagctcactcaaaggcggtaatacggttatccacagaatcaggggataacgcaggaaagaacatgtgagcaaaaggccagcaaaaggccaggaaccgtaaaaaggccgcgttgctggcgtttttccataggctccgcccccctgacgagcatcacaaaaatcgacgctcaagtcagaggtggcgaaacccgacaggactataaagataccaggcgtttccccctggaagctccctcgtgcgctctcctgttccgaccctgccgcttaccggatacctgtccgcctttctcccttcgggaagcgtggcgctttctcatagctcacgctgtaggtatctcagttcggtgtaggtcgttcgctccaagctgggctgtgtgcacgaaccccccgttcagcccgaccgctgcgccttatccggtaactatcgtcttgagtccaacccggtaagacacgacttatcgccactggcagcagccactggtaacaggattagcagagcgaggtatgtaggcggtgctacagagttcttgaagtggtggcctaactacggctacactagaagaacagtatttggtatctgcgctctgctgaagccagttaccttcggaaaaagagttggtagctcttgatccggcaaacaaaccaccgctggtagcggtggtttttttgtttgcaagcagcagattacgcgcagaaaaaaaggatctcaagaagatcctttgatcttttctacggggtctgacgctcagtggaacgaaaactcacgttaagggattttggtcatgagattatcaaaaaggatcttcacctagatccttttaaattaaaaatgaagttttaaatcaatctaaagtatatatgagtaaacttggtctgacagttaccaatgcttaatcagtgaggcacctatctcagcgatctgtctatttcgttcatccatagttgcctgactccccgtcgtgtagataactacgatacgggagggcttaccatctggccccagtgctgcaatgataccgcgagacccacgctcaccggctccagatttatcagcaataaaccagccagccggaagggccgagcgcagaagtggtcctgcaactttatccgcctccatccagtctattaattgttgccgggaagctagagtaagtagttcgccagttaatagtttgcgcaacgttgttgccattgctacaggcatcgtggtgtcacgctcgtcgtttggtatggcttcattcagctccggttcccaacgatcaaggcgagttacatgatcccccatgttgtgcaaaaaagcggttagctccttcggtcctccgatcgttgtcagaagtaagttggccgcagtgttatcactcatggttatggcagcactgcataattctcttactgtcatgccatccgtaagatgcttttctgtgactggtgagtactcaaccaagtcattctgagaatagtgtatgcggcgaccgagttgctcttgcccggcgtcaatacgggataataccgcgccacatagcagaactttaaaagtgctcatcattggaaaacgttcttcggggcgaaaactctcaaggatcttaccgctgttgagatccagttcgatgtaacccactcgtgcacccaactgatcttcagcatcttttactttcaccagcgtttctgggtgagcaaaaacaggaaggcaaaatgccgcaaaaaagggaataagggcgacacggaaatgttgaatactcatactcttcctttttcaatattattgaagcatttatcagggttattgtctcatgagcggatacatatttgaatgtatttagaaaaataaacaaataggggttccgcgcacatttccccgaaaagtgccacctgaacgaagcatctgtgcttcattttgtagaacaaaaatgcaacgcgagagcgctaatttttcaaacaaagaatctgagctgcatttttacagaacagaaatgcaacgcgaaagcgctattttaccaacgaagaatctgtgcttcatttttgtaaaacaaaaatgcaacgcgagagcgctaatttttcaaacaaagaatctgagctgcatttttacagaacagaaatgcaacgcgagagcgctattttaccaacaaagaatctatacttcttttttgttctacaaaaatgcatcccgagagcgctatttttctaacaaagcatcttagattactttttttctcctttgtgcgctctataatgcagtctcttgataactttttgcactgtaggtccgttaaggttagaagaaggctactttggtgtctattttctcttccataaaaaaagcctgactccacttcccgcgtttactgattactagcgaagctgcgggtgcattttttcaagataaaggcatccccgattatattctataccgatgtggattgcgcatactttgtgaacagaaagtgatagcgttgatgattcttcattggtcagaaaattatgaacggtttcttctattttgtctctatatactacgtataggaaatgtttacattttcgtattgttttcgattcactctatgaatagttcttactacaatttttttgtctaaagagtaatactagagataaacataaaaaatgtagaggtcgagtttagatgcaagttcaaggagcgaaaggtggatgggtaggttatatagggatatagcacagagatatatagcaaagagatacttttgagcaatgtttgtggaagcggtattcgcaatattttagtagctcgttacagtccggtgcgtttttggttttttgaaagtgcgtcttcagagcgcttttggttttcaaaagcgctctgaagttcctatactttctagagaataggaacttcggaataggaacttcaaagcgtttccgaaaacgagcgcttccgaaaatgcaacgcgagctgcgcacatacagctcactgttcacgtcgcacctatatctgcgtgttgcctgtatatatatatacatgagaagaacggcatagtgcgtgtttatgcttaaatgcgtacttatatgcgtctatttatgtaggatgaaaggtagtctagtacctcctgtgatattatcccattccatgcggggtatcgtatgcttccttcagcactaccctttagctgttctatatgctgccactcctcaattggattagtctcatccttcaatgctatcatttcctttgatattggatcatactaagaaaccattattatcatgacattaacctataaaaataggcgtatcacgaggccctttcgtc

SEQ ID NO: 58-59 - skipped (2 entries)

SEQ ID NO: 60 - DNA, 1362 bp, Artificial Sequence
  Synthetic
atggacgcgcaacgcggacatacgactaccatcctgatgtttccgtggttggggtacggccaccttagtgcattcctcgaattagccaagagcttgtcgcgtaggaactttcatatttatttctgttccacatctgtcaatttagatgctataaaacccaaactaccatcatcttcaagttccgattctattcagcttgtagagttatgcttgccttcctcgccagaccaactacccccacacctgcatacaactaatgctctacctccacatctaatgcctaccctgcaccaggccttttcaatggcagctcaacattttgcagctatattacatactttagcaccgcacttgttaatctatgattcgttccagccttgggcgccacaattggccagctctcttaacattcctgctattaattttaataccacgggtgccagtgtgctaacaagaatgttacacgcgactcattacccatcttcaaagttcccaatctccgaatttgttttacatgattattggaaagcaatgtattcagcagctggtggtgctgttacaaaaaaggaccataaaataggagaaaccttggcaaactgtttacacgcttcttgctcggtaattctgatcaattcattcagagagttggaagaaaaatacatggattacttgtctgtcttactaaacaagaaagttgtgcccgtgggtccgcttgtttatgagccaaaccaagatggcgaagacgaaggttatagttcgataaagaattggctcgataaaaaggagccctcctcaactgtctttgtttccttcgggtccgaatattttccgtccaaagaagaaatggaagaaattgcccatggcttggaggctagcgaggtacactttatttgggtcgttagattcccacaaggagacaatacttctgcaattgaagatgcccttcctaagggttttcttgagcgagtgggcgaacgtggaatggtggttaagggttgggctcctcaggccaaaattttgaaacattggagcacaggcggtttcgtaagtcattgtggatggaatagtgttatggagagcatgatgtttggtgtacccataataggtgttccgatgcatttagatcaaccatttaatgcagggctcgcggaagaagcaggagtaggggtagaggctaaaagggaccctgatggtaagatacagagagatgaagtcgctaaactgatcaaagaagtggttgtcgaaaaaacgcgcgaagatgtcagaaagaaggctagggaaatgtctgaaattttacgttcgaaaggtgaggaaaagatggacgagatggttgcagccattagtctcttcttgaagatataa

SEQ ID NO: 61 - skipped

SEQ ID NO: 62 - protein, 485 aa, Siraitia grosvenorii
MAEQAHDLLHVLLFPFPAEGHIKPFLCLAELLCNAGFHVTFLNTDYNHRRLHNLHLLAARFPSLHFESISDGLPPDQPRDILDPKFFISICQVTKPLFRELLLSYKRISSVQTGRPPITCVITDVIFRFPIDVAEELDIPVFSFCTFSARFMFLYFWIPKLIEDGQLPYPNGNINQKLYGVAPEAEGLLRCKDLPGHWAFADELKDDQLNFVDQTTASSRSSGLILNTFDDLEAPFLGRLSTIFKKIYAVGPIHSLLNSHHCGLWKEDHSCLAWLDSRAAKSVVFVSFGSLVKITSRQLMEFWHGLLNSGKSFLFVLRSDVVEGDDEKQVVKEIYETKAEGKWLVVGWAPQEKVLAHEAVGGFLTHSGWNSILESIAAGVPMISCPKIGDQSSNCTWISKVWKIGLEMEDRYDRVSVETMVRSIMEQEGEKMQKTIAELAKQAKYKVSKDGTSYQNLECLIQDIKKLNQIEGFINNPNFSDLLRV

SEQ ID NO: 63 - protein, 483 aa, Siraitia grosvenorii
MDQMAKIDEKKPHVVFIPFPAQSHIKCMLKLARILHQKGLYITFINTDTNHERLVASGGTQWLENAPGFWFKTVPDGFGSAKDDGVKPTDALRELMDYLKTNFFDLFLDLVLKLEVPATCIICDGCMTFANTIRAAEKLNIPVILFWTMAACGFMAFYQAKVLKEKEIVPLKDETYLTNGYLDMEIDWIPGMKRIRLRDLPEFILATKQNYFAFEFLFETAQLADKVSHMIIHTFEELEASLVSEIKSIFPNVYTIGPLQLLLNKITLKETNNDSYSLWKEEPECVEWLNSKEPNSVVYVNFGSLAVMSLQDLVEFGWGLVNSNHYFLWIIRANLIDGKPAVMPQELKEAMNEKGFVGSWCSQEEVLNHPVVGGFLTHCGWGSIIESLSAGVPMLGWPSIGDQRANCRQMCKEWEVGMEIGKNVKRDEVEKLVRMLMEGLEGERMRKKALEWKKSATLATCCNGSSSLDVEKLANEIKKLSRN

SEQ ID NO: 64 - skipped

SEQ ID NO: 65 - protein, 524 aa, Siraitia grosvenorii
MEKLQEKLRKIKRAVHGAGTLQRPKCYCQVKLFPSPQAIKRERPHFLLFPFMAQGHMIPMIDLAKLLAQRGAIVTILTTPHNAARTHSVLARAIDSGLQIRVRPLQFPCKEAGLPEGCENLDLLPSLGSASTFFRATCLLYDPSEKLFEELSPRPTCIISDMCLPWTIRLAQKYHVPRLVFYSLSCFFLLCMRSLKNNPALISSKSDSEFVTFSDLPDPVEFLKSELPKSTDEDLVKFSYEMGEADRKSYGVILNIFEEMEPKYLAEYGNERESPEKVWCVGPVSLCNDNKLDKAQRGNKASIDERECIKWLGGQQPSSVVYASLGSLCNLVTAQFIELGLGLEASNKPFIWVIRKGNITEELQKWLVEYDFEEKTKGRGLVILGWAPQVLILSHPSIGCFLTHCGWNSSIEGISAGVPMVTWPLFSDQVFNEKLIVQILRIGVSVGAETAMNWGEEEEKGVVVKREKVREAIERMMDGDEREERRERCKELAETAKRAIEEGGSSHRNLTLLIEDIGTSLRRL

SEQ ID NO: 66 - protein, 532 aa, Siraitia grosvenorii
MLMHALTPTAPFFSIKPNTEPPSATTRQPPMDSPPQKPHFLLFPFMAQGHMIPMIDLAKLLAQRGAIITVVTTPHNAARYHSVLARAIDSGLHIHVLQLQFPCNEGGLPEGCENFDLLPSLGSASTFFRATFLLYEPSEKVFEELIPRPTCIISDMCLPWTVRLAQKYHVPRLVFYSLSCFFLLCMRSLKNNQALISSKSDSELVTFSDLPDPVEFLKSQLPKSNDEEMAKFGYEIGEADRQSHGVIVNVFEEMEPKYLAEYRKERESPEKVWCVGPVSLCNDNKLDKAQRGNKASIDERECIEWLDGQQPSSVVYVSLGSLCNLVTAQLIELGLGLEASNKPFIWVIRKGNITEELQKWLVEYDFEEKTKGRGLVILGWAPQVLILSHPAIGCFLTHCGWNSSIEGISAGMPMITWPLFADQVFNEKLIVEILRIGVSVGMETAMHWGEEEEKGVVVKREKVREAIERAMDGDEREERRERCKELAEMAKRAVEEGGSSHRNLTLLTEDILVNGGGQERMDDADDFPTIVN

SEQ ID NO: 67 - protein, 500 aa, Dichanthelium oligosanthes
MGSQGQAATSGRGDADDTGGGTQAAHFVFIPLMAQGHLIPAVDTALLLATHGAICSIVGTPATAARVRRTVDSARQSGLTVRLVEFPLDYAEAGLPEGADNMDNVPVEYMQNYFHAIALLRAPIESYFRAHAPYPTCVVSDFIHPWTTVLAANLGVPRLSFFSMCAFCLLCQHNVERFDAFEGVADHNEAVVVPGLEKRFLVTRAQAPGFFRGSAEWEEFADYIERARAEADGVIMNTFEEMEPEYVAGYAAARKMRVWTVGPVSLYHQRAATLAARGNAIAIDADECLRWLDGKEPGSVVYVSFGSIAQAVAKQAVELGIGLEASGQPFIWVLRNAHEYDEAARAFLDELEARVAGRGLLVRGWAPQVLILSHAAVGGFVTHCGWNSTLEAVTAGLPVVTWPHFTDQFLNEKFTVEVLGIGVSVGVTEPLMYQAVEKEIMVGRDVVEAAVRSVMGGGEEAEERRRRARALAVMARAAMQEGGSSHGNLLDLVSRFKAAS

SEQ ID NO: 68 - protein, 473 aa, Brachypodium distachyon
MAVDSTENSVAIVAVPFPAQGHLNQLMHLSLLLASRGLPVHYAAPAAHVRQARSRVHGWDPKSLVSIHFHDLDVPAFESPAPDPAAPSPFPNHLMPLWETFTTAARAPLAALLETLSATHRRVVVVYDRLNSFAAVEAARVGKGNAEAFALQCVAISYNIGWLDPGHQLLRDHGLEFLPIDVCMSKEFVEFVFRTEKEMQEEGGAGAAPAGMVMNTSRAIEGEFIDTIAAHPVFENQKLFAVGPLNPLLDASARTPGKARHECMDWLDEQPAASVLYVSFGTTSSFLGEQIAELAAALKGSKQRFIWVLREADRADIFADSGESRNHDKMLAEFTKETEGTGLVITGWAPQLEILAHGATAAFMSHCGWNSTMESLSHGKPILAWPMHSDQPWDAELLCKYHKAGLLVRPWEKHNEVVPAEDIQKVIEEAMLSDNGMAVRQRAKVLGEAVRASVADGGTSSQGLDDFVAHISR

SEQ ID NO: 69 - protein, 460 aa, Genlisea aurea
METSPTEVAVVMVPLAAQGHLNQLLHLARLISGRRGISVHFIATSTHCRQATSRIQDWNPANSAAVHFHEVDVPLAENPPPNPDSVYKFPSQVIPIIKSATVNLRKPIHDLALSLSSAHKRVVIVYDSATAYSVQDAESVPNTEFYCFQSTAAFTMFAFNWEFAGRPELPPEAEVFKEVPSAEGCFVPEFEELIAFGNETKILKSGYIYNSSRIIEGFYLDLRLGDGIDKIWAFGPFHRTPENPPETGRENDCLKWLDEQSPNSVIFISFGTTVSLSDEQIQEIATGLERSHQKFIWVLRDADRADIFSGGEVRRPELPPNFEERVGGRGRVIRDWAPQPAILDHPSTGGFMTHCGWNSFLESISAGVPMATWPMHSDQPKNAALITKVLKVGVEVKDWRRWKEIVTAETVENSVRVLMGSEEGDAMRKRAAVMGKALRESVKENGSSAMELDSFLEHIT

SEQ ID NO: 70 - protein, 497 aa, Capsella rubella
MASEKTHQVHPPLHFVLFPFMAQGHMIPMVDIARVLAQHGATVTIVTTRYNSGRFDNVLSRAIESGLPINIVHVKFPYQEFGLPEGKENIDSLDSMGLMVPFFKAVNMLEDPVMKLMEEMNSRPSCIISDLLLPYTSKIAKKFNIPKIVFHGIGCFCLLCVHVLRQNLDILKNLKSEKEYFRVPSFPDRVEFTKPQITVDTNASGDWKEFLDEMVEAEYTSYGVIVNTFEELEPAYVKDYKEARAGKVWSIGPVSLCNKAVSDKAERGNKAAIYQEECLKWLDSKKESSVLYVCLGSICNLPLAQLKELGLGLEETQRPFIWVIRGWEKYNELSEWMMESGFEERIRERGLIIRGWAPQVLILSHPCVGGFLTHCGWNSTLEGITSGVPLLTWPLFGDQFCNQKQVVQVLKVGVSAGVEEVMRWGEEEKIGVLVDKEGVKKAVEELMGESDGAKDRRTRVQELGELAHKAVEEGGSSHSNITLFLQDIRQVQSVGIF

SEQ ID NO: 71 - protein, 463 aa, Oryza meridionalis
MAIGSVESVAVVAVPFPAQGHLNQLMHLSLLLASRGLDVHYAAPPAHVRQARSRLHGWDPEALRSIRFHDLDVPAYESPPPDPTAPPFPSHMMPMIQSFTVAARAPFAALLERISASYSRVVVVYDRLNSFAAAQAARLPNGEAFGLQCVATSYNIGWLEPEHRLVREHGLQFQPMEACMTKEFVELISRAEQDEENAACSGILMNTSRALEAEFIDEIAAHPMFKELKLFAAGPLNPLLDATARTADQTRHECMDWLDKQPLASVLYVSFGTTSSLRGDQVAELAAALKGSKQRFIWVLRDADRADIFADSGESRHAELLSRFTAETEGVGLVITGWAPQLEILAHGATAAFMSHCGWNSTMESLSYGKPILAWPMHSDQPWDAELVCKYLKAGLLVRPWEKHSEVVPAEAIQEVIEEAMLSEKGMAIRRRAKELGEAVRASVADGGSSRKGLDDFVGYITR

SEQ ID NO: 72 - protein, 987 aa, Leersia perrieri
MAPMEEEPVSATPPPPSPPHFVIVPLPAQGHTIPMVDLAFLLAERGARATLVVTPANASRLRAAAGLAARANLPLEIVELPFPPPAETGLPAGVENVDQVTDYAHFLPFFTALRSLASPLESYLRSLPSPPSCLISDWCQSWTSDVATRGGIPRLFFHGPSCFYSLCDLNAAAHGLQPQHGERFIVPGMPVRVEVTKETRPGFFKEPGWEAIHEASMEAMRTADGAVVNTFVGLESQFVSCYETALGKPVWALGPFSLYNRDADMMASRGNDNTSDVDAQTWLDEIDEDDSVIYVNFGSLARKPPKYLFEVGHGLEDSGKPFLWVVKESEVISPEVEQWMSAFVLRTATRGLVVRGWAPQLAILSHRAVGGFVTHCGWNSMLEAIAHGVPVVTWPHFADQFLNERLAVDVLGVGVPIGVTMPVMLFGDEAVPVTRGDVARAVSALMDGGEEGEERRRKAKEYGEKARRAMEKGGSSYESLTQLIDSFTLQAMETTEQASQPPPHFVLVPLAAHGHLLPMVDLARLLASRGVRVSLATTPLNVARLRGVADQAAREKLPLELVELPFSPSAETGLPPECQNADKIADDAQLVPLLNAMRDALAAPFDAYVRALRPKPTCVVSDFCNPWTAAVSRRLGIPRLFFQGPSCFYSLCDLKSAVHGLQDRIVADEHGTAFVVPGMPVHVTVTRGTAPGFYNAPDFDALRHEAMEAMRTADGAVVNTFADLEAQFVECYEATLGKPVWALGPFCLGNRDDTLMASCGSTVLSVDQRALAAWLDEQATGSVVYVNFGSLVRKAPAQLFEIGHGLEDSGKPFLWVVKESEATAATAEARDWLDAFVARTATRGVVVRGWAPQVAILSHRAVGGFVTHCGWNSLLEAVAHGVPVVTWPHFADQFLNEKLVVDVLGVGVPIGVTAPVQIMDDVSLPVSRRDVARAVLELMGDGEVANERRRKAKEYGEKARRAMEKGGSSYECMTQLIQSFMPSGVTE

SEQ ID NO: 73 - protein, 466 aa, Trema orientale
MATDLLQGSSASPPVVVVMVPFLAQSHLNQLLQFAHVVSSYDLPVHYVSSTLHISQVKSRASNPLNQLTKIHFHDYHVPFQPPPPPPNLCSKSKFPRNLIPCFEASTHLRQPVAALLRALSPTAKRLVVVHDLLTASVVQDVVSLPNAEAYSVNCGSIFAYFAYLCDGLGRNDIVPIKDIPPWDSCFPTVVNDFIAGQIRETKFQAGELLNSCRAIEGPFLELLANDINSQGEKKTWAVGPLHQTTISKELRDRDKCLLEWLDQQEPNSVLYISFGTTTTFSDEEIKEIALGLEQSGVKFIWVLRDADKADIFSNEEVRRPQLPDGFEERIKGMGMVVREWVPQVEILGHPSTGGFMSHCGWNSCMESISLGVPIAAWPMHSDQPMNALLITEVLKVGVAVREWGQRDELVTSSMISRAVRKLMASEEGDEIRKRAGELGGEVRKSTAEEGITRLEWNSFIAHITR

SEQ ID NO: 74 - protein, 477 aa, Citrus clementina
MEQTRVPHVVLLPFPAYGHIKPMLSLAKLFSHAGFRITFVNTEQYHDRLFGNTDVTAFYKHFPNFLCTSIPDGLPPDNPRFGIYIKDWFCSNKPVSKLAFRQLLMTPGRLPTCIISDSIMSFAIDVAEELNIPIITFRPYSAYCSWSDFHFSKLAEEGELPVTDENFDKSVTCIPELENIFRNRDLPSICRHGGPDDPILQTFIRDTSATTRTSALVINTFNEIEGPIMSKLGSRLTKIYTIGPLHALLKSRIQEDSVESSPLESNNCVLSKEDRSCMTWLGSQPSRSVLYVSFGSFIKLSGDQILEFWHGIVNSGKGFLWVIRSDLIDGESGVGPVPAELDQGTKERGCIVSWAPQEEVLAHQAIGGFLTHSGWNSTLESMVAGVPMICWPQVGDQQVNSRCVSEIWKIGFDMKDTCDRSTIEKLVRDLMDNKRDKIMESTVQIAKMARDAVKEGGSSYRNLEKLIEDIRLMAFKA

SEQ ID NO: 75 - protein, 493 aa, Parasponia andersonii
MASQAKQLHFLLFPLMAQGHMIPMVDIARMLAKRGAMVTIVTTPHNAARFERVLTRAIETGLRIQIIQLKFPSEEAGLPEGCENFDMLPSLDLASKLFAAASMLQQPAEKSFEELTPQPNCIIADMCLPWTINIARKHNIPRISFHGVCCFCLLCLHNVRSSKVLDHVDSETEYFIVPDLPDQIEVTKAQLPVLLTSNLKEFHDQMIEAEIGSYGAIINSFEELEPAYIRDYKKVRKDKIWCIGPASLCNKDDLDKAQRGNKSSVDEYQCLKWLDSWKPSSVVYVCLGSLCNLVYSQLIELGLGLEASNRPFIWVIRGGTSMSEELVKWLKEDGFEERTKGRGMVILGWAPQVLLLSHPAVGAFLTHCGWNSTLEGVCAGVPMVTWPLFADQFLNEKLVAQILNVAISLGSEATSKWGEEEQEQVGIKVKTDTIKCVLERVLDEGEESKERRERARKLGEIAKRAVEEGGSSHLNMTLFLEEIMQLGTYSQRE

SEQ ID NO: 76 - protein, 507 aa, Noccaea caerulescens
MLESFFLALKIRMGSETTNKSYPLHFVLFPFMAQGHMIPMVDIARLLAQRGVTVTIVTTPYNAGRFNNVLSRAIESGLPINIVPVKFPYQEVGLSEGQENIDLLDSMGLMIPFFKACNMLEEPVKKLMEEMSPPPSCLISDMCLPYTSKLAKEFNIPKILFHGFCCFCLLCMHVLRKNREILENLKSDKEYFVVPYFPDRVEFTRPQVPVETYSPEEWKEFLEDLKEADKTSYGVIVNTFQELEPAYVNDYKEARSGKAWSIGPVSLCNKLGADKAERGNKSDIDQSECLKWLDSKEEGSVLYVCLGSICNLPLAQLKELGLGLEESKRPFIWVIRGWEKYKELGEWISESGFEERIKDRGLIIRGWSPQMIILSHPSVGGFLTHCGWNSTLEGITSGLPLLTWPLFADQFCNEKLVVQVLKAGVKVGVEEVMKFGEEEKIGVLVDKEGVKKAVEELMGESDDATKRRRRAKELGELAHKAVEEGGSSHSNITLLLEDITQLAQSKK

SEQ ID NO: 77 - protein, 495 aa, Arabis alpina
MASKTTQQLHPPLHFVLFPFMAQGHMIPMVDIARLLAQRGVTITIVTTPHNAGRFKNVLSRAIQSGLPINLMQVKFPSLESGSPEGHENVDMIDSMESSVSFYKATNMLEEPVEKLLKDINPRPSCIIGDMCLPYTNRIAKKFGIPKITFHGMCCFNLLCIHIMRENHEFWGSIESDNEYFPVPNFPDRVEFTKSQLSMVHAGGDWKEFFDEMKEGDKNSYGVIVNTFEELEPAYVRDYKKVKAGKVWSIGPVSLCNKVGADKAERGNKAAIDQDECTKWLDTKEEGSVLYVCLGSICNLPLSQLKELGLGLEESQRPFIWVIRGWEKYNELVEWISESGYKARIKERGLLIRGWSPQMLILSHPAVGGFLTHCGWNSTLEGITSGVPLITWPLFGDQFCNEKLAVQVLKVGVRAGVEKLMRWGEEEEIGVLVDKEGVKKLVEELMGESDDAKERRRRAKELGELAHKAVEEGGTSHSNITILLEDIMQQAQNNN

SEQ ID NO: 78 - protein, 413 aa, Melittangium boletus
MKILFFPVPAHGHVNPMLPLARELVSRGDEVLFYVTPEFEAVVRATGASVRFLDKALSIREDLSGPGGGPPRFQQIIPELLGLMSLGLREAPRMAEQARAEKADGVVYDPIAPWGRAIAHLLGVPAAIFQTSFAMSSPWIQREMKKTFNGRPPLAALRPLLEMQWNALMLELRHGVPRLGMKGMFAHAEGLNIIPVPRSYQPDAELFDARHLFVGPAVAPRGDSGDFPLEQLEGKPVLFVSLGTSPMNQQPDFYKACFEAFRDTRWQVVMACGKNLDPARLGPTPSNFIVRQRVPQVEILSKARVFLTHGGMNSTMEGLWHGVPLAVFPQFGDQPINAARVTNMGLGATLTPQDALTPRVLRETVERLDTDPGYRTRMAGFQKELQEAGGQRRAADALQAYVAARQGPSRRAA

SEQ ID NO: 79 - protein, 460 aa, Siraitia grosvenorii
MDETTVNGGRRASDVVVFAFPRHGHMSPMLQFSKRLVSKGLRVTFLITTSATESLRLNLPPSSSLDLQVISDVPESNDIATLEGYLRSFKATVSKTLADFIDGIGNPPKFIVYDSVMPWVQEVARGRGLDAAPFFTQSSAVNHILNHVYGGSLSIPAPENTAVSLPSMPVLQAEDLPAFPDDPEVVMNFMTSQFSNFQDAKWIFFNTFDQLECKKQSQVVNWMADRWPIKTVGPTIPSAYLDDGRLEDDRAFGLNLLKPEDGKNTRQWQWLDSKDTASVLYISFGSLAILQEEQVKELAYFLKDTNLSFLWVLRDSELQKLPHNFVQETSHRGLVVNWCSQLQVLSHRAVSCFVTHCGWNSTLEALSLGVPMVAIPQWVDQTTNAKFVADVWRVGVRVKKKDERIVTKEELEASIRQVVQGEGRNEFKHNAIKWKKLAKEAVDEGGSSDKNIEEFVKTIA

SEQ ID NO: 80 - skipped

SEQ ID NO: 81 - protein, 400 aa, Streptomyces wuyuanensis
MTEAKRAHIAMFSIAAHGHVNPSIEVIRELVARGHRVSYAIPPSFAEKVTATGAEPVLWNSTLPTDDEPEAWGTELIDNIEPFLNDAIQALPQLADAFAGDEPDLVLHDITSYPARVLAHRWGVPAISLSPNLVAWDGYEEEVGEPMTAGLRATERGRAYYARFESWLSENGIGIHPDPFVGRPARSLALIPRVLQPNADRVDESVHSFVGACQGDRAEQGEWRRPAGAGKVLLVSLGSAFTKQPAFYRECVKAFGDLPGWHVVLQIGKFVDPSELSPVPANIEVHDWVPQLAVLRQADVFVTHAGAGGSQEGLATATPMVAVPQAVDQFGNADMLASLGVARHLPMEEATAGGLRDAVLALAADPEVARRLEEIRLSMLLEGGTRRAADLIEAELPPGD

SEQ ID NO: 82 - skipped

SEQ ID NO: 83 - protein, 394 aa, Unknown
  Bacillus sp. SDLI1
MRQTHIAIINVGAHGHVNPTLPVAEELVNRGHRVTFATTEEFEAAVAKTGAVPLLYRTSIKADPKTIKERVNKNDAFVMFLEEAVEVLPQLEELYKDDLPDIVLFDFLALAGKLFADNGGIRAVKFCPSYAMNEYFQLGRDEETMEAAKQAIEEYQEKIENEQLKRMTMEEFFMPEKLNIVFMPRAFQPKQETFDERFCFAGPSLGKRTNTGSLEIDAADERPLMLISLGTAFNAWPEFYQMCIDAFRDSEWRVIMSVGTTIDPDSFSDVPDHFIIRQHVPQLDVLKKAKLFVSHGGMNSTMEAMNAGVPLVVVPQMHEQEVTAKRVDELGLGVHLPPKEVTAARLQKEVQKVYGDKNILSRVKSMQQKIEETGGAKQAVCAIEEFLKEASVEN

SEQ ID NO: 84 - protein, 434 aa, Unknown
  Natrialba sp. SSL1
MSTGKTIAFFPEAAYGPALNSVGIAQECRELGHEPVFLTDPPMAEVFEDHGFETYEVNMADPSLTAEEKSKYWDDFINKHIPNFDKEPYDQLDNYITECWDAIVETATWAQQDLPDVLEEVDPDLICVDNVILFPAIKQYGVPWVRIVSCSENEIPDPNIPPYLSGCRADDVESHHEFERRYDELIAPVHDDFNDFLREHGEEPYPHGLFFETSPYLNLIKYPERLRWDRWNELDPDRFQYLNGCIRDEDETYEVPPIGDEDDPLVYLSYGSLGAGDTDLMKRLLEFFGSQPYRFLVNVGEYIEEYDESQIPENVEIDSWFPQQSVISQADIVIHHGGNNTFNECLYYGKPAIIMPYVWDGQDNATRLDETNHGIKLHRSDWTPEEFAEALESCLTDEEIQANVAETSADMQEHSGTEKAARLLDDVLEDHANV

SEQ ID NO: 85 - protein, 405 aa, Unknown
  Streptomyces sp. NRRL WC-3605
MTSPAHIAMFSIAAHGHVNPSLEVIRELVARGHRVTYAVPPVFAEKVAATGAEPKSWTSTLPGPDADPEAWGSTLLDNVEPFLADAIQALPQLIEAYEGDEPDLVLHDITSYPARVLAHRWGVPAVSLSPNLVAWEGYEEEIAEPMWAEPKKTERGQAYYRRFENWLKENGVDLHPDPFVGRPDRSIVLIPRALQPNADRVDERVYSFVGACQGDRTTEGGWQRPAGAEKVALVSLGSAFTKQPAFYRECVRAFAGLPGWHLVLQVGRHVDPAELGEIPPNVEVRDWVPQLAILKQADLFVTHAGAGGSQEGLATATPMIAVPQAVDQFGNADMLQALGVARHLPTGEATAEALRETALALTGDPEVARRLKDIQAEMAQEGGTRRAADLIETELDAARASRAGA

SEQ ID NO: 86 - protein, 399 aa, Streptomyces nanshensis
MTESPRAHIAMFSIAAHGHVNPSLDVIRELVSRGHRVSYAIPASFAGKVAVTGAEPVIYTSTLPTEEDPEAWGTELIDNLEPFLDDAVQALPQLAAAFDGDEPDLVLHDITSYPARVLAHRWGVPAVALWPNLVPWEGYEKEVGEPMTAEMRQTERGRAYYERFAAWLSENGLGHLSSDDFVARPRRGLVLIPEALQPNADRVDHGMFTFVGACQGDRADQGEWRRPAGAEKVLLVSLGSSFTKQPAFYRECVAAFGGLPGWHVVLQIGAHVDPAELGDVPANMEVHPWVPQLAVLKQADAFITHAGAGGSQEGLATGTPMVAVPQAVDQFGNADMLQALGVARHVPMEEADATTLREAVLALVGDPEVAERSARLRERMAKEGGTLRAADLIEAELPR

SEQ ID NO: 87 - protein, 460 aa, Siraitia grosvenorii; identical to SEQ ID NO: 79

SEQ ID NO: 88 - protein, 510 aa, Siraitia grosvenorii
MATTRQPPMDSPPQKPHFLLFPFMAQGHMIPMIDLAKLLAQRGAIITVVTTPHNAARYHSVLARAIDSGLHIHVLQLQFPCNEGGLPEGCENFDLLPSLGSASTFFRATFLLYEPSEKVFEELIPRPTCIISDMCLPWTVRLAQKYHVPRLVFYSLSCFFLLCMRSLKNNQALISSKSDSELVTFSDLPDPVEFLKSQLPKSNDEEMAKFGYEIGEADRQSHGVIVNVFEEMEPKYLAEYRKERESPEKVWCVGPVSLCNDNKLDKAQRGNKASIDERECIEWLDGQQPSSVVYVSLGSLCNLVTAQLIELGLGLEASNKPFIWVIRKGNITEELQKWLVEYDFEEKTKGRGLVILGWAPQVLILSHPAIGCFLTHCGWNSSIEGISAGMPMITWPLFADQVFNEKLIVEILRIGVSVGMETAMHWGEEEEKGVVVKREKVREAIERAMDGDEREERRERCKELAEMAKRAVEEGGSSHRNLTLLTEDILVNGGGQERMDDADDFPTIVN

SEQ ID NO: 89 - protein, 390 aa, Saccharopolyspora rectivirgula
MMRSTVPAHIAFMTIPAHGHINPGLGLVRELVSRGHRVTCPTTEEFGPKVRRTGAEPVFHTSVLPSPSSPNQKWPEELPAVQELFLRETERVVAQLEEAYAGDRPDLILYDIAAFQAPVLAHRWGVPYLQLSPTHVAFEGIEQQFDVQATPELAKVQAEYDAYLARQGVELDFTALTTPPRCIVTIPRSFQYRADTVSDACTFVGPLLTEPEEPWQRPDDRPVLLISMGSAYTKVPEFYRTCLAAFGGLDWHVVMSIGRMVDPAELGEIPDNVEIHPWVPQRAVLAQADLFITHAGMGGICEALSHGVPMVAAPQAAEQFANAARLEELGLGRQVDSGSVSPEQLRETALAVHADPAVHRRLRAVRQEIAEAGGLQRAVEIVESMLPAAG

SEQ ID NO: 90 - protein, 387 aa, Unknown
  Streptomyces sp. M56
MAHIAMVGIPAISHTLPSLEIIRELVARGHRVTYANGASMADVIKPTGAEFVPFDSTLPVADNDWPADPIAAMTLFLDDAMQALPQLRAVYDRDPADLYLYDIGAYPARVLAETQGRPLVQLSPTIVGWEGYHDEIGAQIMSLPGAEAYQEKFATWLAESGATTTDPNAFSGLPPRCVALIPRAMQPNADRVNTEVVTFVGPCLGDRADQGGWERPAGAEKVLLISLGSAYTRQATFYRECVAAFGELPGWHVVLQIGKYVDPGELGEIPANIEVHNWVPQLAILERADAFITHAGMGGSSEGLYCGVPMIAVPQGAEQPMNADRLVELGVARRIDTADAAAGALRAALTELTTDPEVARRSARLKAEARAEGGTGRAADLIEDALR

SEQ ID NO: 91 - protein, 391 aa, Unknown
  Streptomyces sp. 76
MPRTTHIAMVGTPMVSHVLPSLEIIRELVSRGHRVTYANAEPAAALIAPTGAEFVRCTTTLPVVDNAWPQDPVAASSLFLDDAIALLPQLHAAYDDDPADLYLYDVGAYAARALAEAQGRDIVQLSPTFVGWDGAEAEIAAAFAGLPGAEEYQARFAAWLAGCGARTTDVAEFSGRPRRALATIPRAMQPHADRVDADAVTFVGPCLGDRAEQGGWTRPAGAERVLLVSLGSAYTRQPEFYRQCVAAFGDLPGWHVVLQIGRYIDPAELGSTLPANIEVRSWVPQLAILEQADAFVTHAGMGGSSEGLYAGVPMIAVPQGAEQFFNADRLVELGVARRLDTADATAEALRTALTELTADPRVAARSAELRAEVRAEGGARRAADLLEARLG

SEQ ID NO: 92 - protein, 402 aa, Bacillus cereus
MANVLVINFPGEGHINPTLAIVSELIRRGETVVSYCIEDYRKKIEATGAQFRVFENFLSQINIMERVNEGGSPLMMLSHMMEASERIVTQIVEETKGEKYDYLIYDNHFPVGRIIANVLKLPSVSSCTTFAFNQYITFNDEHESRKVDETNPLYQSCLAGMEKWNKQYGMKCNSMYDIMNHPGDITIVYTSKEYQPRSDVFDESYKFVGPSIATRKEVGSFPMEDLKDKKLIFISMGTVFNEQPELYEKCFEAFKDVEATVILVVGKKINISQFENIPNNFRLFNYVPQLELLQYADVFVTHGGMNSSSEALYYGVPLVVIPVTGDQPLVAKRVSEVGAGIRLNRKELTSESLREAVGKVKYDVTFKENSRKVGESLRNAGGYNRAVDEILKMKMNSYSKLK

SEQ ID NO: 93 - protein, 401 aa, Bacillus cereus
MANVLVINFPGEGHINPTLAIVSELIQRGETVVAYCIEDYRKKIEATGAEFRAFENFFSQINIMERVNEGGSHVLMLSHMMEASERIVNQIIEETKGEQYDYMIYDNHFPVGRIIANVLKLPNISSCTTFAYNQYIVFNDEQESRQVDENDPLYQSCLAGMEQWKNRYGMECNSLYDIMNHPGDITIVYTSKEYQPYSDVFDESYKFVGPSIATRKEIGSFPIEDLKNKKVVFISMGTVFNEQPELYEKCFEAFKDIDVIVILVVGKKMNINQFEDIPYNFKVYNYVPQLEVLKHTDVFVTHGGMNSSSEALYYGVPLVVVPVTGDQPLVAKRVAEVGAGIRLNRKVLTPKLLREAVKKVMDDVTFKEKSRKVGESLRDAGGYKKAIEEIEQFMSNYQPSK

SEQ ID NO: 94 - protein, 396 aa, Bacillus sonorensis
MEQKHIAIFNIPAHGHINPTLALTKKLVERGYRVTYPVTDEFVAAIEETGAEPLQYRSTLNINPQTIREMMKNKEDMPQAPKMFMKEVEEVLPQLEELYQHDRPDLIVYDFMAMTGKLIAEKLGVEAVRLCSTYAQNEHFQFKDLVERMQIEKVGQQVSDLKNANFSTARFEELFEPAKLNIVFMPRAFQPYGDTFDERFRFVGPSLAERKFQNNNEQLVKDDGRPVMLISLGTAFNAWSEFYSMCIDAFRDTKWQVIMSVGAAIDPESFEDIPDNFSIRQSVPQLEILKKAKLFITHGGMNSTMEALNEGVPLVVIPQMPEQEMTARRVEELGLGRHLQPEATTVQRLQEAVSQVDDNTELLNRVKDMQENIKEAGGAEKAADEIEAFFKPITVN

SEQ ID NO: 95 - protein, 400 aa, Unknown
  Streptomyces sp. OK228
MTTRPAHIAMFSIAAHGHVNPSIEVIRELVARGHRVTYAIPPAFAEKVAETGAEPRLWHSTLPTDDDPEAWGTELIDNIEPFLTDALQAEPQLAAAYEGDEPDLVLYDITAYPARVLAHRWGVPIVQLSPNLVAWEGYDEEVGKPLFEPLKQTPRGKAFYDTFARWIAENGMDLSVEDFMGRPDRCLVLIPKALQPNADRVDEKRYTFVGACQGEPSAQGDWRRPADAEKVLLVSLGSSFTKQPAFYRACVEAFGGLPGWHVVLQIGRFVDPAELGEVPGNVEVHPWVPQLAILRQADAFITHAGAGGSQEGLATGTPMVAVPQAVDQFGNADMLQALGVARHLPMTEATAETLREAVLALVEDPEVARRLAMIREEMAGEGGTGRAADLIEAELRPRQA

SEQ ID NO: 96 - protein, 408 aa, Streptomyces virginiae
MTTAKPAHIAMFSIAAHGHVNPSIEVIRELVARGHRVSYAIPASFAEKVAETGATPVIYTSTLPTDDEPEAWGTELIDNLEPFLRDAVQALPQLAAAFEGDEPDLVLHDITSYPAPVLAHRWGVPAISLSPNLVAWEGYEQEVAEPLFADLKASERGKAYYAAFAAWLTENGLGDDVDRFQGRPRRSIVLIPRALQPHADRVDTSVYTFVGACQGDRSATQGTWQRPAAAGGRKVVLVSLGSAFTKQPAFYRACIEAFADLPDWYVVLQIGRFTDEADLGPVPANVEVHRWVPQLDILRQADAFITHAGAGGSQEGLATATPMVAVPQAVDQFGNADMLVSLGVARHVPMAEADAATLREAVLRLVADPEVAARAEAVRAQMAGEGGTRQAADLIEAALSQPGPRVRA

SEQ ID NO: 97 - protein, 403 aa, Unknown
  Streptomyces sp. RSD-27
MTSAKPAHIAMFSIAAPGHVNPSIEVIRELVARGHRVSYAIPASFAGKVAETGATPVVWTSVLPTEDEPEAWGTELIDNIEPFLDDAVQALPQLAAAFEGDEPDLVLHDITSYPAGVLARRWGVPAISLSPNLVAWEGYEEEVAAPMTAELRASERGRAYYARFRAWLDENGIDEDADRFVGRPRRSIVLIPRALQPYADRVDESVYTFVGACQGDRSATQGTWERPASAEGRKVLLVSLGSTFTKQPAFYRACIEAFGDLPDWHVVLQIGKFTDEADLGEVPANVEVHRWVPQLDILRQADAFITHAGAGGSQEGLATGTPMVAVPQAVDQFGNADMLASLGVARHVPMGEADAATLREAVLGLLADPGVAVRAEEIRTQMAAEGGTRRAADLIEAALPQGG

SEQ ID NO: 98 - protein, 394 aa, Saccharopolyspora shandongensis
MADTAQNSYRTRPAHIAFMSMPAHGHVNPGLGLVAELVARGHRVTYATTDDFAPQVAEAGATPVRYTSTLPGSSADAQEWPEEQVAAQEMFLEEMMAVVPQLEQAYAADRPDLIVYDVAGFQALVLSEKWQVPRLQLSPTHVYFEGIEETFGIEFSPEALAVQAKYDEYFAQQGTELVFRDVEKSNRCVVTIPRSFQYFGERVSDSYTFVGPMLTERAFQDDWQAPDSRPVLVISLGSAYNNRVEFYRKCLRAFADLDWHVVMSVGRSTDPAELGEIPPNFDVRQWIPQLRVLSQASAFITHAGMGGTMEGLYHEVPLIAVPQAADQFMNAARIGELQLGTQVDCESVTPEQLRAALEQVTSSEVIRLRLKEMRREILESGGLRRAAEIVESLL

SEQ ID NO: 99 - protein, 394 aa, Unknown
  Epulopiscium sp. AS2M-Bin001
MSKIVFFSLPAHGHVNPTLSLVSQLVKNGHEIMYYCFDAFKDKIEQTGAKYISCDDYLPIHMFEEATTNLPHILAIPNMLMYVTANMQSKCLAEITDFNPDCIIHDSLALWGRLYAEKLGILPISSTTTFIFNKAMSKRIPLPLKYLLAVIPPTIPSIPKYLKLTKQLSKDFEYGSLMDMIMAKEDEYTITYTSQLLQSYLEPNPKTKFVGTMIDTSDIPVEKNNKPKNIYISLGTINNQNKKFYKNCFEALKNYEANITMSVGKETDISSLGEIPSNFNVQNFVNQLEVLKTTDIFLTHGGMNSVNEGLANGIPLVVFPQQPEQTLVATQVETFGAGIRLKKSSIKEILVCINEIMDNKKYEEKARIISQEFKDLGGATSAVQFIEDILNNNL

SEQ ID NO: 100 - protein, 403 aa, Unknown
  Bacillus thuringiensis serovar andalousiensis BGSC 4AW1
MMANVLVINFPGEGHINPTLAIISELIRRGETVVSYCIEDYRKKIEATGAEFREFENFLSQINIMERVNEGGSPLTMLSHMIEASERIVTQIVEETKGEQYDYLLYDNHFPVGRIIANVLQLPSISSCTTFAFNQYITFNDEQESRQVDETNPLYQSCLAGMEKWNRQYGMKCNSMYDIMNHPGDITIVYTSKEYQPRSDVFDESYKFVGPSIATRKEVGSFPMEDLKGEKLIFISMGTVFNEQPELYEKCFEAFKGVEATVILAVGKKINISQFENIPNNFKLYNYVPQLEVLQHADVFVTHGGMNSSSEALYYGVPLVVIPVTGDQPLVAKRVNEVGAGIRLNRKELTSELLRETVKKVMYDVTFKENSRKVGESLRNAGGYKRAVDEIFKMKMNSYLKLK

SEQ ID NO: 101 - protein, 414 aa, Unknown
  Massilia sp. KIM
MHVVVVTIGSAGDLFPFLWMGRTLRARGHRVDFLAPVQHEPWVRQAGLDFHGLPADPAVLDHPDLWHPTRGLAVVWKATRPAMIEVPTFVDALDPDEPRILLVHPLALPEAQLCRDTQPLMKIAAAYLAPSNLPTVHDPLLLGPWRVPPWVPHPVRRLLWRGLAAALIDPVALPDVNAARAAAGQPPVKNLIRYLSHIPDLSITLFPEWFAPTQPDWPRPLLRCGFPLYDPAPDAAPSPALEAFLASGERPVVFTPGTGNRQARRYFEDAASAARELGLRAVFLTPYREQLPEVLPAGTLWQDYVPLRSLLPQAAALVHHGGIGTTAEALRAGTPQLVVPLAHDQFDNAARVEALGVGMSLHARRLNAARLTQALRELLGREAPARRASEVAARLAAPPDATALCLRLEFLLSA

SEQ ID NO: 102 - protein, 481 aa, Siraitia grosvenorii
MIPMIDLAKLLAQRGAIITVSTTPHNAARYHSVLARAIDSGLHIHVLQLRFPCKEGGLPEGCENIDLLPSHYSPFTFFSATFLLYEPSEKVFEELIPRPTCIISDISLPWTIRLAHKYHVPRLVFYSLSCFFLLCMRSLRNNQALISSKSDSELVTFSDLPDPVEFLKSQLPKSNDEEMAKFGYEIGEADRQSHGVIVNVFEEMEPKHLAEYRKERESPEKVWCVGPVSLCYDNKLDKAQRGNKASIDERECIEWLDGQQPSSVVYVSLGSQCNLVTAQLIELGLGLEASKKPFIWVIRKAIITEELQKWLVEYDFEEKTKGRSLLIRGWAPQVLILSHPALGCFLTHCGWNSSIEGISAGVPMVTLPLFGDQIFNETLIVQILRIGVRVGVEAAMQCGEEEEIDRGVVVRREKVREAIGIVMDGDEREGRRERCKELAETAKRAVEEGGSSHQNLTRLIEDIASSLRRLSEWKFYLIIIS

SEQ ID NO: 103 - protein, 460 aa, Siraitia grosvenorii
MDETTVKGGRRASDVVVFAFPRHGHMSPMLQFSKRLVSKGLRVTFLITTSATESLRLNLPPSSSLDLQVISDVPESNDIATLEGYLRSFKATVSKTLADFIDGIGNPPKFIVYDSVMPWVQEVAGGRGLDAAPFFTQSSAVNHILYHVYGGSLSIPAPENTAVSLPSMPVLQAEDLPAFPDDPEVVMNFMTSQFSNFQDAKWIFFNTFDQLECKKQSQVVNWMADRWPIKTVGPTIPSAYLDDGWLEDDRAFGLNLLKPDDGKNTRQWQWLDSKDTASVLYISFGSLAILQEEQVKELAYFLKDTNLSFLWVLRDSELQKLPHNFVQETSHRGLVVNWCSQLQVLSHRAVSCFVTHCGWNSTLEALSLGVPMVAIPQWVDQTTNAKFVADVWRVGVRVKKKDERIVTKEELEASIRQVVQGEGRNEFKHNAIKWKNLAKEAVDEGGSSDKNIEEFVKTIA

SEQ ID NO: 104 - protein, 488 aa, Vigna radiata
MSSQEQGPHFVLFPLMAQGHMIPMMDIAKLLVHHAVTVTVVTTPRNAARFTPIFDRYVGSGLPIRLAQLPFPCEEVGLPEGCENIDMIPSLGTARTFFEATNLLHQPAEKLFGEFSPPPSCIISDMCLPYTSHIAKKFNIPRISFVGVSCFCLLCHHTILVNNVRENIASDSEYFVLPGIPDKIEMTMEQSGVTLNETWEQFREDIMGAEMATYGVIMNSFEELEPEYAREYKKVKDDKVWCIGPVSLINKDHLDKAQRGRASVDESEHMKWLDCQKAGSVIYACLGSLCNLTAPQLIELGLALEASERPFIWVIREGKHSEPLEKWIEENGFEERTSSRSLVIRGWSPQLLILSHPAIGGFITHCGWNSILEAICAGVPMITWPLFADQFLNESLVVKVLKVGVKVGVETPMIWGKEEEVGVEVKKEEIERAIAEIMNETSESEERRERVRELGEMAQRAVEKGGSSHSNVSFLIQNIMQKNNGVTP

SEQ ID NO: 105 - protein, 496 aa, Cicer arietinum
MESQQLNIVFLPYPTPGHMIPMIDTARLFAKHGANVTIITTHANVSSFQKAIDSDFSAGHSIKTQLIQFPSAQVGLPDGVENIKDGTSLEMLGKITRGIWMLQDQIEILFQDLEPDCIVTDMMYPWTVQCAAKLGIPRLHFYSSSYFSNCACHFIRKCKPHEGLVSDTNKFTIPGLPHSIQMTTLQLPDWMRNKSFATGYFEEMFESEERSYGTICNSFHELESDYEKLCKTIMGIKCWSIGPVSAWANKDDDEKKANRGHMEINNIGNEQEWLNWLNSKPNDSVLYVSFGSLTRLPHLHLVEIAHGLENSGHNFIWVVRKKDRDEGGNGFLQEFEKRMKESDKGYIIWNWAPQLLILDHPATGGIVTHCGWNSILESLNAGLPMIAWPVFAEQFYNEKLVTEILKIGVPVGVKENKLWASFGEEAIVRSEEIVKAVEILMGSGQDSKEMRMRAKMLGDAAKRTIEEGGHSYNNLIQLIDELKSLKKSKALAVKED

SEQ ID NO: 106 - protein, 443 aa, Eucalyptus grandis
MDNMQRPIKVLMLPWLAHGHVSPYLELAKRLSTRNFHIYLCSTPVNLSSIKPKISEKYSSSIELVELHLPSLPDLPPHYHTTKGLPPHLMNTLKAAFDMASPGFGDIVTSLGPDLLIHEFLQPWAAEVAKSHGLPSVVLFNVGAGTISFMFHMIKNTGNKFPFEAIRLHDYELAKIRKAADDSTARVNEKDRVLQSVERSSNFILLKTFREMDGKYMDYLSSLLGKKVLTVGPLVEDPSNTEDGDSIIEWLDKREKSSTIFVSFGTEYFLTEKEREEIAHGLELSNVNFIWVIRFSVEESVELKEALPKGFLERVRDRGLVIDGWAPQGKILEHPSIGGFVSHCGWGSIMESMKSGVPIIAMPMQHDQPLNARMVEEVGVAMEVKRNKSGELERLEIAKVIKHVVAEKDGDSVRKKTKEMSDSIRNKGEEELDEVAEALVQLC

SEQ ID NO: 107 - skipped

SEQ ID NO: 108 - protein, 440 aa, Capsicum annuum
METKKNTISVLMLPWLAHGHISPFLELAKKLANRNFHIYLCSTPVNLSSIKKGVAQKYSQSIELVELHLPSLPNLPPHYHTTNGLPPHLMNTLKTAYETVAPSFSKLLQTLNPDLVIYDYNQPWAADSATSVNIPAVQFLTFSAAVIALGIHMYDNPGEMFPFPEIYLSEYERLSLDKALQGGKFPFDEGLRRSQDIILMKTCRDFEGKYMDYLSSLVSKKIVPVGTLVQESTNKDDHEEIMQWLDKKDKRSTVFVSFGSEYFLSKEEIHEVAEGLERGKVNFIWVIRFPQGERISIRDALPEGFLELVGERGMVMEGWAPQATILQHASIGGFMSHCGWSSFTESMKFGVPIIAMPMHIDQPMNARLVEYMDMGVEAVRDENGKLQREEIAKAIRKVVVEESGEVVRKKAKELSEKMNAKGDEEIDGVVEELVALCNNK

SEQ ID NO: 109 - protein, 455 aa, Capsicum annuum
MATEVTKYPSTLKVLMFPWLAYGHISPFLNLAKKLADRGFLIYFCSTPINIKSIIKKIPEKYCDSIELVELHLQELPELPPHYHTTNGLPPHLNHTLQKAMKMFKPNFVKILQNLKPDLVIYDIVQQWAERAANEQNIPTVKLIPSGAVAVTYFFNLANKLGVDYPFSAIYLRKIEQVKMSETFAKHAEGKEDDDVDPFANGNMQIVLVSTSRILEAKYIDYCTELMNWRAVPVGPPVQDPMYNDDADEVELIDWLGKKGENSTVFVSFGTEYFLSREDREEIAFGLELSNVNFIWVVRYPNGEEQNLEDVLPKGFLERIGDRGRVLNKFAPQSRILNHPTTGGFVSHCGWNSVMESIDFGVPIIAMPVHLDQPMNARLMVELQVAVEIVRDDDDKIHRGEIAETLKGVVTGKIGENLRAKIRDISENLKSTRGEEMDAAANELIQLCKNSNKCK

SEQ ID NO: 110 - protein, 452 aa, Handroanthus impetiginosus
MESLATNHKTLHVLMFPWLAHGHISPYVELAKRLTKRNFIIHLCSTPANLSSIKHKIGEKYALSIHLVELHLPTLPKLPPCHHTTNGLPPDLMPILKLAFEMSKPNFNRILETIRPDLLIYDFLQPWAPLAASRYGIPAVEFITSSSTMTAYMFHFFLRPNLEFPFENISYRDYELVHRANLLPLDERIKRDAFEGIHRSNNIILIKGFREIESKYSDYLSTMLGKKIVPVGPLVQDPIQEFEDPLEIIKWLDKKPKNSTVFVSFGSEYFLKQEETQELAHGLELSNINFIWVVRFPKGEKRTLEQVLPSGFLERVRDRGLVLEGWAPQAQILGHENIGGFVSHCGCSSMMESMKFGVPIIAMPMHLDQPLNARLLEEIGVGVEVVRNGLGRLDKEEVAAVIRRVVAEDGGEGVRRNAKLMSEKIKEKGDEEIDEVVEEFVKLCKKKGNGFH

SEQ ID NO: 111 - protein, 483 aa, Helianthus annuus
MMMNNYGRKRTVLMFPWLGHGHISPFLELAKKLSNTNLFNIYLCSTPANLKSVKKTLKNECDSPSIRLIELHLPTLPDLPPHLHTTNGLPLHLMPTLKQAFDMSSPRFSRILKTLSPDLLIYDMIQSWAPVSAAALGIPSVVFVTTSATMAATMFHLYLNYSKGIAFPFRTIYFRTYEYKHVHEILESSANNRKDKDRVMECVGNSSSIVLVKSFKEIESKYADYLSTLTGKKIVPVGPLVVDPCHADSKQDSVIQWLDTKDTGSTVFVSFGSEYFLSSADLEEIAYGLEMSNVNFIWVLRFPKCETKVQLSQHLPLGFLERVKDRGLLVEGWAPQTKILGHKNIGGFVSHCGWNSVMEAMKFGVPIIAMPMQLDQPVNARLAVEVGVGVEVVRDGNGRLMREKVAAVVQRVVVSELGACVREKAKKMSVGLREKGEEEIDVVVDELLKLCQCGGSRGGRKGLPKTKSETFAIDMYCAVETEV

SEQ ID NO: 112 - protein, 454 aa, Solanum lycopersicum
MDGSNEKSIRVLMFPWLGHGHISPFFELAKKLVKRNFTIFLVSTPANFISIKQKLIHENLCDKIHLFDLRLPSLPDLPPHYHTTNGLPPHLMSTLKKAFAKSRPIFTQIMNTIEPDLLLYDLLQPWAPKVAKEKNIPSVVFVTSSATMFSYMFHNFRYPNSQFPFSSIYYRDYELTRLIKNQEMETIEQHQRDNKSVKMCFKRSTNIVLIKGFKEIDGQYCEYISSLTKKRVVPVGPLVQEQTSEDNNSQILTWLNQKSKGSTIFVSFGSEYFLSQEDREEIAHGLEQSRVNFIWVVRFPKGEKLKLEQALPRDFFKKVGERGMVVEDWAPQAKILGNPNIGGFVSHCGWNSVLESMKIGVPIIAMPMHLDQPLNARLVEEVGIGLEVVRDKDGKLDGEQISEIINKVVLEKEGESIREKAKKMSETIRVKGDEEIDDVVQELVNLCKTRSNVV

SEQ ID NO: 113 - protein, 456 aa, Prunus persica
MVYSDQRKLTILMLPWLAHGHISPYLELAKKLTTKRNFHIFICSTPVNLSSIKPKLSQKYSHCIEFVELHLPHDDLPELPPHYHTTNGLPPHLMSTLKRAFDMSSNNFSNILKTLSPDLLIYDFLQPWAPSLASLQNFPSIEFITMGAAFTSFSIQHLKNPSVKFPFPSIYLQDYEAEKFNNVLESSANGIKDGDRVQQCSARSCNIILVKTSRGIEEKYIDYLSDLMGKKIVPVGTLVQEPVDQKVDEETWIMKWLNKMERSSVVYVCFGSEYFLSKEQIEEIAHGLELSKVSFIWVIRFSKEEKNTRVEEVLPEGFLQRVGEKGVIMEGWAPQAKILQHSSVGGFVSHCGWNSVLESIKFGVPIIAMPMHLDQPINARLVEEVGVGVEVKRTGEGSLQREEVAKVIRDVFVEKIGEGVRKKALKIRDNMNKKEDEEIDGVVEELMQVCTGRESK

SEQ ID NO: 114 - protein, 451 aa, Prunus persica
MVYSERRTLTILMLPWLAHGHISPFLELAKKLTSKRNFHIFICSTPVNLTSIKPKLSPKYSHCIEFVELHLPHDDLPELPPQYHTTNGLPPHLMSTLKRAFDMSSNNFSTILTALKPDLLIYDFLQPWAPSLASLQNIPSVEFITTSAALTSFSVHHLRNPIDKFPFPSIYLRDYEAKKFNNLLESSSNGIKDGDRVLQCSDLSSGIILVKTSREIEAKYVDYLSGLMGKKIVPVGPLVQEPMDLKVDEETWIMKWLNKRERSSVVYVCFGSEYFLSREQIEELAHGLELSKVSFIWVIRFPKEEKGNRVEEVLPEAFLERVGEKGVIVEGWAPQAKILNHSSVGGFVSHCGWSSVLESIKFGVPIIAMPMHLDQPINSRLVEEVGVGVEVKRTAEGSLERKEVAKAIRDVVAKKIGEGVRKKALEIRDNMKNKEDEEINGVVEELMQLCT

SEQ ID NO: 115 - protein, 4 aa, Artificial Sequence
  Synthetic
SKIP

SEQ ID NO: 116 - protein, 4 aa, Artificial Sequence
  Synthetic
SKIP

SEQ ID NO: 117 - protein, 231 aa, Zoanthus sp.
MAQSKHGLTKEMTMKYRMEGCVDGHKFVITGEGIGYPFKGKQAINLCVVEGGPLPFAEDILSAAFMYGNRVFTEYPQDIADYFKNSCPAGYTWDRSFLFEDGAVCICNADITVSVEENCMYHESKFYGVNFPADGPVMKKMTDNWEPSCEKIIPVPKQGILKGDVSMYLLLKDGGRLRCQFDTVYKAKSVPRKMPDWHFIQHKLTREDRSDAKNQKWHLTEHAIASGSALP

SEQ ID NO: 118 - protein, 4 aa, Artificial Sequence
  Synthetic
SKIP

SEQ ID NO: 119 - protein, 4 aa, Artificial Sequence
  Synthetic
SKIP

SEQ ID NO: 120 - protein, 4 aa, Artificial Sequence
  Synthetic
SKIP

SEQ ID NO: 121 - protein, 453 aa, Siraitia grosvenorii
MDAQRGHTTTILMFPWLGYGHLSAFLELAKSLSRRNFHIYFCSTSVNLDAIKPKLPSSSSSDSIQLVELCLPSSPDQLPPHLHTTNALPPHLMPTLHQAFSMAAQHFAAILHTLAPHLLIYDSFQPWAPQLASSLNIPAINFNTTGASVLTRMLHATHYPSSKFPISEFVLHDYWKAMYSAAGGAVTKKDHKIGETLANCLHASCSVILINSFRELEEKYMDYLSVLLNKKVVPVGPLVYEPNQDGEDEGYSSIKNWLDKKEPSSTVFVSFGSEYFPSKEEMEEIAHGLEASEVHFIWVVRFPQGDNTSAIEDALPKGFLERVGERGMVVKGWAPQAKILKHWSTGGFVSHCGWNSVMESMMFGVPIIGVPMHLDQPFNAGLAEEAGVGVEAKRDPDGKIQRDEVAKLIKEVVVEKTREDVRKKAREMSEILRSKGEEKMDEMVAAISLFLKI

SEQ ID NO: 122 - protein, 9 aa, Artificial Sequence
  Synthetic
MDAQRGHTT

SEQ ID NO: 123 - protein, 5 aa, Artificial Sequence
  Synthetic
TILMF

SEQ ID NO: 124 - protein, 4 aa, Artificial Sequence
  Synthetic
PWLG

SEQ ID NO: 125 - protein, 16 aa, Artificial Sequence
  Synthetic
YGHLSAFLELAKSLSR

SEQ ID NO: 126 - protein, 3 aa, Artificial Sequence
  Synthetic
RNF

SEQ ID NO: 127 - protein, 4 aa, Artificial Sequence
  Synthetic
HIYF

SEQ ID NO: 128 - protein, 3 aa, Artificial Sequence
  Synthetic
CST

SEQ ID NO: 129 - protein, 6 aa, Artificial Sequence
  Synthetic
SVNLDA

SEQ ID NO: 130 - protein, 11 aa, Artificial Sequence
  Synthetic
IKPKLPSSSSS

SEQ ID NO: 131 - protein, 4 aa, Artificial Sequence
  Synthetic
DSIQ

SEQ ID NO: 132 - protein, 23 aa, Artificial Sequence
  Synthetic
LVELCLPSSPDQLPPHLHTTNAL

SEQ ID NO: 133 - protein, 21 aa, Artificial Sequence
  Synthetic
PPHLMPTLHQAFSMAAQHFAA

SEQ ID NO: 134 - protein, 8 aa, Artificial Sequence
  Synthetic
ILHTLAPH

SEQ ID NO: 135 - protein, 5 aa, Artificial Sequence
  Synthetic
LLIYD

SEQ ID NO: 136 - protein, 4 aa, Artificial Sequence
  Synthetic
SFQP

SEQ ID NO: 137 - protein, 9 aa, Artificial Sequence
  Synthetic
WAPQLASSL

SEQ ID NO: 138 - protein, 3 aa, Artificial Sequence
  Synthetic
NIP

SEQ ID NO: 139 - protein, 5 aa, Artificial Sequence
  Synthetic
AINFN

SEQ ID NO: 140 - protein, 3 aa, Artificial Sequence
  Synthetic
TTG

SEQ ID NO: 141 - protein, 12 aa, Artificial Sequence
  Synthetic
ASVLTRMLHATH

SEQ ID NO: 142 - protein, 21 aa, Artificial Sequence
  Synthetic
YPSSKFPISEFVLHDYWKAMY

SEQ ID NO: 143 - protein, 4 aa, Artificial Sequence
  Synthetic
SAAG

SEQ ID NO: 144 - protein, 6 aa, Artificial Sequence
  Synthetic
GAVTKK

SEQ ID NO: 145 - protein, 15 aa, Artificial Sequence
  Synthetic
DHKIGETLANCLHAS

SEQ ID NO: 146 - protein, 2 aa, Artificial Sequence
  Synthetic
CS

SEQ ID NO: 147 - protein, 4 aa, Artificial Sequence
  Synthetic
VILI

SEQ ID NO: 148 - protein, 7 aa, Artificial Sequence
  Synthetic
NSFRELE

SEQ ID NO: 149 - protein, 10 aa, Artificial Sequence
  Synthetic
EKYMDYLSVL

SEQ ID NO: 150 - protein, 2 aa, Artificial Sequence
  Synthetic
LN

SEQ ID NO: 151 - protein, 3 aa, Artificial Sequence
  Synthetic
KKV

SEQ ID NO: 152 - protein, 20 aa, Artificial Sequence
  Synthetic
VPVGPLVYEPNQDGEDEGYS

SEQ ID NO: 153 - protein, 9 aa, Artificial Sequence
  Synthetic
SIKNWLDKK

SEQ ID NO: 154 - protein, 4 aa, Artificial Sequence
  Synthetic
EPSS

SEQ ID NO: 155 - protein, 5 aa, Artificial Sequence
  Synthetic
TVFVS

SEQ ID NO: 156 - protein, 8 aa, Artificial Sequence
  Synthetic
FGSEYFPS

SEQ ID NO: 157 - protein, 14 aa, Artificial Sequence
  Synthetic
KEEMEEIAHGLEAS

SEQ ID NO: 158 - protein, 3 aa, Artificial Sequence
  Synthetic
EVH

SEQ ID NO: 159 - protein, 5 aa, Artificial Sequence
  Synthetic
FIWVV

SEQ ID NO: 160 - protein, 7 aa, Artificial Sequence
  Synthetic
RFPQGDN

SEQ ID NO: 161 - protein, 11 aa, Artificial Sequence
  Synthetic
TSAIEDALPKG

SEQ ID NO: 162 - protein, 5 aa, Artificial Sequence
  Synthetic
FLERV

SEQ ID NO: 163 - protein, 4 aa, Artificial Sequence
  Synthetic
GERG

SEQ ID NO: 164 - protein, 4 aa, Artificial Sequence
  Synthetic
MVVK

SEQ ID NO: 165 - protein, 4 aa, Artificial Sequence
  Synthetic
GWAP

SEQ ID NO: 166 - protein, 6 aa, Artificial Sequence
  Synthetic
QAKILK

SEQ ID NO: 167 - protein, 5 aa, Artificial Sequence
  Synthetic
HWSTG

SEQ ID NO: 168 - protein, 4 aa, Artificial Sequence
  Synthetic
GFVS

SEQ ID NO: 169 - protein, 3 aa, Artificial Sequence
  Synthetic
HCG

SEQ ID NO: 170 - protein, 10 aa, Artificial Sequence
  Synthetic
WNSVMESMMF

SEQ ID NO: 171 - protein, 3 aa, Artificial Sequence
  Synthetic
GVP

SEQ ID NO: 172 - protein, 4 aa, Artificial Sequence
  Synthetic
IIGV

SEQ ID NO: 173 - protein, 4 aa, Artificial Sequence
  Synthetic
PMHL

SEQ ID NO: 174 - protein, 12 aa, Artificial Sequence
  Synthetic
DQPFNAGLAEEA

SEQ ID NO: 175 - protein, 2 aa, Artificial Sequence
  Synthetic
GV

SEQ ID NO: 176 - protein, 3 aa, Artificial Sequence
  Synthetic
GVE

SEQ ID NO: 177 - protein, 10 aa, Artificial Sequence
  Synthetic
AKRDPDGKIQ

SEQ ID NO: 178 - protein, 13 aa, Artificial Sequence
  Synthetic
RDEVAKLIKEVVV

SEQ ID NO: 179 - protein, 1 aa, Artificial Sequence
  Synthetic
E

SEQ ID NO: 180 - protein, 21 aa, Artificial Sequence
  Synthetic
KTREDVRKKAREMSEILRSKG

SEQ ID NO: 181 - protein, 4 aa, Artificial Sequence
  Synthetic
EEKM

SEQ ID NO: 182 - protein, 11 aa, Artificial Sequence
  Synthetic
DEMVAAISLFL

SEQ ID NO: 183 - protein, 2 aa, Artificial Sequence
  Synthetic
KI

SEQ ID NO: 184 - DNA, 2271 bp, Artificial Sequence
  Synthetic
atgtggagattgaagattgcagaaggtggatccccatggttacgtaccacaaataaccatgttggtagacaaatctgggagttcgaccctaacttgggtactccagaacagataagagaagtcgaagaggctagagaaaacttttggaaaaatagattcgaacaaaagcactcttcagatttattgatgcgtatgcaatttgcccaagaaaactcttccaatgttgtcttgccacaagttaaggtcaaagatgaagacgaaattactaaggaagctgttaaatctaccttggaaagagctttatctttctactccgccgtccagacttcagacggtaactgggcttctgatttgggtggtcctatgtttttattgccaggtttggttatcgctttgtccgtcactggtgccttaaacgctgttttgtctaaggagcaccaaaaggaaatgtgcagatatttatacaaccatcaaaataaggatggtggttggggtttgcacattgagggtcactcaaccatgttcggtaccgttttgacatatgtcactttgagattgttgggtgaaggtgttgatgacggtgatggtgctatggaaagaggtagaaaatggacattagaacatggttccgcaactgctatcacctcttggggtaagatgtggttgtctgttttgggagtcttcgaatgggctggtaataatccaatgccaccagaaacctggttattgccatacatcttaccagtccaccctggtcgtatgtggtgtcattgtagaatggtttacttgcctatgtcatacttgtacggtaaaagatttgttggtccaattactccaacagttttatctttaagaagagaattgttcgacgttccatatcacgagatcgattgggaccgtgccagaaacgaatgtgctaaggaagatttatactatcctcacccattggtccaagacattttgtgggcctccttacataaggccgtcgagcctatattgatgagatggccaggtaaaaagttgcgtgaaaaggctttgtctactgtcatggaacacatacactacgaagacgaaaacaccagatatatttgtttgggtccagttaataaggtcttgaacttgttgtgctgttgggttgaagatccttattctgatgctttcaagttacatttgcaacgtgttcatgactacttgtgggttgccgaagacggtatgaagatgcaaggttacaacggttcccaattgtgggacactgctttttctatccaggctattttagcaaccaacttaggtgaggaatatggtggtacattgagaaaagcacacaatttcatcaaggattcacaaattcaagaagattgtccaggtgacccaaacgtttggtttagacatatccataagggtgcttggccattttccactcgtgatcacggttggttaatttcagactgcactgctgaaggtttgaaagcatccttgatgttatctaaattaccatccacaatggtcggtgaaccattggaagttaacagattgtgtgatgctgttaacgtcttgttgtctttacaaaatgataatggtggtttcgcctcatacgaattgaccagatcttacccatggttggaattgataaaccctgctgagactttcggtgacatcgtcattgactacccatacgttgaatgtacctctgcaactatggaagccttgaccttgttcaagaagttgcatcctggtcacagaaccaaggagatcgataactgcattaaaaaggctgctaaatttttggagaagatgcaaagagctgacggttcctggtatggttgttggggtgtctgttttacttatgcaggatggttcggtataaaaggtttggttgccgctggtagaacttacaattcctgtttggctattcgtaaggcttgcgaatttttgttatctaaggaattaccaggtggtggttggggtgaatcttacttatcctgtcaaaacaaggtctatactaatttggaaggtaataagcctcatttggttaacactgcctgggttttaatggctttgattgaagccggtcaggctaagagagatccaatgccattacacagagctgctaaagttttgatcaactctcaaatgccaaacggtgatttccctcagcaagaaattatgggtgtttttaaccgtaattgtatgatcacctatgctgcttacagaaatattttcccaacctgggctttgggtgaatacagaactcaagtcttacaaaagtaa

SEQ ID NO: 185 - DNA, 2286 bp, Artificial Sequence
  Synthetic
atgtggcgtttaaaaacaggttctgaaaccgtcggggataacggtagatggttgagatcaactaataaccacgttggtagacaagtttgggagttctttcctgaaatgggttccccagaagaattggtcgctatcgaagccgctcatagagaatttcacttgaatagattccataagcagcactcttccgacttattgatgcgtttgcaatatgagagagaaaagccatgtgttcaaaaggaaggtgcagttagattggacgctactgaaaccccaactgaagccgctgtcgaaaccacattaagacgtgctttaactttctactctaccatgcaatcagatgacggtaactgggcctctgatttgggtggtcctatgtttttgttgccaggtttagttatagctttgtacgtcactggtgtcttgaactccgttttgtccaaagaacatcaaagagaaattagaagatatttatacaatcaccaaaaccaagatggtggttggggtttacacatcgagggtccatctactatgttcggttctgctttgaactacgttaccttgcgtttattgggtgaaggtccagatgacggtgaaggtgcaatggaaagagccagacaatggattttatctcgtggtggtgcagttgctgttacctcctggggtaagttgtggttgtcagtcttgggggtctatgagtgggacggtaacaatcctttgccaccagaattgtggttgttaccatactctttgcctttacatccaggtagaatgtggtgccattgtagaatggtttacttgccaatgtcctatttatacggtaagagattcgttggtcctattactccaactgttttatctttgagagaggaattgtacccaatcccttatcaccatgttgactggaacaaagctagaaacacctgtgctcaggatgatttgtactacccacacccattcgtccaggacttattgtggggttctttatatcacgtctacgaaccattggttatgagatggccaggtaagagattgcgtgaaagagccttgcaacacgtcatgaagcatattcattacgaggatgaaaattctcgttacatctgtttgggtccagttaataaagctttaaacatgttatgctgttgggtcgaagacccacactctgaagcttttaagatgcatataccaagaatttatgactatttgtggatcgccgaagatggtatgagaatgcaaggttataatggttcccaattgtgggatactgctttttccgtccaagctattgtcgccactaagttgacagacgaattttcagagaccttagcaaaggctaacaaatacatcttggatgcccaaattttgaaaaactgtcctggtgatccaaatgtttggttcagacacatccacaagggtgcttggccattctctacaagagaccatggttggttgatctcagattgcactgctgaaggtttgaaggcatccttaatgttgtcaaaattaccttctaagattgttggtgaaccattagagaaaaacagattgtacgacgctgttaacgttttgttgtcattacaaaacgaaaatggtggttttgcttcttatgaattgacaagatcctacccatggttggaattgatcaatccagccgagaccttcggtgatattgttatagattatacctacgttgaatgtacctctgctacaatggaagctttaactttattcaagaagttacacccaggtcatcgtaagaaggaaattgaaagatgtatggctaacgctgccaaattcttggaaatgagacaagaggcagacgggtcttggtacggttgctggggtgtctgttacacatatgctggttggttcggtattaagggtttggttgcagctggtagaacttacaataattgtgcaaacatcagaagagcttgcgactttttgttgtcaaagcagttgccaaatggtggttggggtgagtcctacttgtcctgtcaaaacaaattatacactaacttgaacaatgacagaatgcacaccgtcaacaccgcctgggctatgatggccttgattgaagctggtcaagctaagactgatcctatgccattgcaccatgctgcacgtaccttgattaacgctcaaatggaaactggtgactttcctcaacaagaaataatgggtgtttttaataagaactgtatgatcacttatgctgcctatagaaacgttttcccagtctgggctttaggtgaataccaccaccgtgttttgaacggttgttaa

SEQ ID NO: 186 - DNA, 2286 bp, Artificial Sequence
  Synthetic
atgtggcgtctgaagacaggctctgagactgttggtgacaacggtagatggttacgcagtaccaataaccatgtcggaaggcaagtatgggaatttttccctgaaatgggttcccccgaagaacttgttgctattgaagccgcacacagagaatttcacctaaaccgtttccataaacagcactcttcagatttgctcatgagattacaatacgagagagaaaagccatgcgtccaaaaagaaggtgctgtgagattggatgctacggagactccaaccgaagcggctgtcgaaactacattgcgtagagccttgaccttctatagcactatgcaatctgacgatggtcactgggctaatgacttgggtggcccaatgtttcttttgccaggtttggttataaccttaactatcactggtacgattaacgttgttttatccaaggaacatcaaagagaaatcagacggtacctatataaccaccagaatcaagatggtggttggggtttgcatatcgaaggaccatcgaccatgttcggtagcgcgttgaactacgttacgttgaggctcctgggggagggtcctgacgacggtgaaggagctatggagagagccagacaatggattctgtccagaggtggtgctgtcgctgtaacctcttggggtaagttatggttgtcagttttgggtgtgtacgaatgggatggtaataacccgttgccaccggagctttggcttctaccttactctttaccattgcacccaggtcgaatgtggtgtcactgtagaatggtctatttgccaatgtcgtacttgtacggtaagagattcgtcggtcctattactccaactgttctttccttaagagaagaactctacccaatcccctatcatcatgtcgattggaacaaagctagaaatacatgtgcacaagacgacttgtattatccacacccatttgttcaagatctgctgtggggttctttgtaccacgtttatgaaccattagttatgagatggcccgggaagagattgcgagaaagagccttacagcacgtgatgaaacatatacactacgaagatgaaaacaccgaatacatttgtttaggaccagtgaataaggcattgaacatgttgtgttgctgggttgaagaccctcattctgaagctttcaagatgcacattccgcggatctatgattacctgtggatcgctgaagacggcatgaaaatgcaaggttacaacggcagtcaattgtgggatactgccttcgccgtccaagctatcgttgctacaaagttgactgacgaattttccgaaaccttggccaaagctaataagtacattttggacgctcaaatactgaagaactgtccaggtgatcctaatgtatggtacagacatattactaagggggcttggtctttttctaccgcggatcaaggttggcttgtttcagactgtaccgctgaaggtttgaaggcattattgttgtactctatgctcccacaccagaaagccccatccagcatcgaaaagaaccgtctttatgatgctgtaaacgttttactatctatgcaaaacgctgatggtggtttcgcttccttcgaacttacgcgtagttatccatggttggaaatgattaacccagccgaaacattcggtgacatagtcatcgattacacttacgtcgaatgtacctctgctgtgattcaagcattggctttgttcaagagattgcacccgggacacagaaagaaggaaatagagaggtgtatggctaacgcagctaaatttttggagatgagacaagaagccgatggctcatggtatggttgctggggtgtttgttatacatacgccggttggtttggtatcaaaggtctaacctcctgtggtagaacttacaataattgcgccaacattagaagagcttgcgactttttattgtcgaaacaactgccaaatggtggttggggcgagtcctacttgagctgtcaaaacaagttgtacaccaatttgaacaacgaccgtatgcacactgtcaatactgcttgggctatgatggcgttaattgaagctggtcaagccaagactgacccaatgcccctacatcatgctgctagaaccctaattaatgcacagatggagaccggcgactttccccaacaagaaatcatgggtgttttcaataagaattgtatgatctcttacgccggttatagaaacgttttcccagtatgggctttaggcgaataccatcacagagtgttgaacggttgttaa

SEQ ID NO: 187 - DNA, 2226 bp, Artificial Sequence
  Synthetic
atgtggcgtttgaagatcgcagagggtaaagaaggtccttacttaaagtcaacaaacaattttgttggaagacagacctgggaatttgacccagatgccggtactccagaagaaagagctgctgtcgaagaagccagacgtgctttctattctaacagatacagagttaaaccaccagctgatttgttatggagattgcaattcatgagagagaagaatttcaagcaaattattcctatggtcagaatcaaggacggtgaagctataactcacgaaaaagcaaccgccactttgagaagagccgttcatttcttgactgtcttacaatccatcgacggtcactggccagctgagaacgctggttgccattactttttgccaccattagttttttgtttgtatattacaggtcacttgtcttccgttttctctcaagaacatcaaagagaaattttgcgttacatctataatcaccaaaacgaagatggtggttggggtttacacatcgaaggtcactctattatgttctccaccgctttgtcttacatatgtttgcgtattttgggtgaaggtttagaaggtggtcaggacaacgcttgtgctaaggctcaaaaatggattttagatcatggttcagttactcacataccttcctggggtaagacctggttgtctgtcttgggtttgttcgattggtccggttcaaatccaatcccaccagaattttggatgttaccatcttttttacctattcatccaggtaagatttggtcatactgccgtactacatatatgccaatgtcctacttgtatggaaagaagttcgtcgctcctatcaccccattgattatccaattaagaaaagagttgtacttgcaaccatacgacgaaataaactggagaaaggttagacatttgtgtgcaaaggaagatttgtattacccacacccagttattcaagatttaatgtgggactgtttatacgtcttcactgaacctttgttgaatcgttggccattgaacaagatgatcagagaaaaagccttgaaggttaccatgaaccatattcactacgaagatgagaactcttcttatatcaatatggcttgtgtcggtaaagttttgtgtaccttggcttgctgggttgaagacccaaacggtgactacttcaaaaagcacttggccagaatcccagattacatttgggtcgctgaagatggtatgactatgcaaggtttggcctctcaaacttgggactccggtttagctatccaagcattgtttgcctccaacttgatagatgaaattggtccaactttaaagagagctcatgatttcatcaagaagtctcaagttttagacaatccttttggtgactttaaaaagatgttcagacactcctctaagggttcatggaccttctcagtcagagatcacggttggcctgtttctgactgtacagctgaaggtttgaaatgctgtttgttgttgtctatgttaccacaagagattgttggtgaaaagttagaagttgagagattgcatgatgctgtcaatatcattttccacttacaatccaagaacggtggtgtcgccgcatgggaacctgttagagcatccaaatggttggaattgttgaatccaatcgaatttttggaagatatagttgtcgaccatgagtatttagaatgtaccgcttcttctatagacgctttacagttatttaagaaattataccctacttgtgagcgtgaagaaattgaaaacttcatcttgaaggctgttgaatatatcgaaaacattcagatgtctgatggttcttggtatggtaactggggtgtctgcttcatctacggtacattgttcgctttgaagggtttagctaaggcaggtaagacttatgacgattgtgtcgctatgagaaaaggagttgattttttgttaagaatccaaagagacgatggtggttggggagagtcatacaagtcctgtccaaataaaaagtttgaaccattgcagagagaaggttccaacgtcgtccaaactgcttgggccattttaggtttgattgagtctcgtcaaattatgagagacccaaccccattgcacagagcaataaagttcatcatcaactctcaattagaagatggtgactttccacaacaggttagaggtttgtcctacatttattcatctttgtcctttttgccagttattaagatgtaa

SEQ ID NO: 188 - DNA, 2301 bp, Artificial Sequence
  Synthetic
atgtggcgtttaaagatcggtgccgacaccgtcttgacagatccatcaaatgcaggaggtagatggttgtctactttatccaaccatttgggtagacaggtttgggaattttgtgctgagttgggttctcctgaagacttgcaacaaatacaacacgctagacaaagattctccgatcacagattcgaaaaaaagcattctactgacttattgatgcgtatgcaatttgctaaggaaaactcatctttcgttaatttgccacaaattaaagtcaaggataaggaggatgttaccgaagaagccgtcactagaactttgaaaagagctattaacttctattctaccatccaggcacacgacggtaactgggcttccgacttaggtggtccaatgtttttgttgcctggtttagttattgctttgtacgttacaggtgttttgaactccgtcttgtctaccgaacatcaaagagaaatctgccgttacttatataatcaccaaaacagagatggtggatggggtttgcatatcgagggtccatctactatgtttggttccgtcttgaactacgttactttaagattattgggtgaagaagccgaagacggtcaaggtggtgtcgataaggctagaaagtggattttagatcacggtggtgctaccgccataacatcatggggtaagatgtggttgtctgttttaggtgtttacgaatgggcaggtaataatccattgccaccagaattgtggttgttaccatacttgttgccttgtcatccaggtagaatgtggtgtcactgtagaatggtctatttgccaatgtgttacttgtatggtaagcgtttcgttggtcctattacaccaattatcagatccttgagaaaagagttgtacttagttccttatcacgaagttgactggaacgtcgctagaaaccaatgcgctaaagaagatttgtactatccacatccattagtccaggatgtcttatgggcctctttgcatcacgtttacgaaccattgttcatgtgttggcctgctaagagattgagagagaaggcattaagaactgttatgcaacacatacactacgaagatgaaaattctcgttacatctgtttgggtccagtcaacaaagtcttgaacatgttgtgctgttgggttgaagacccacattccgaggctttcaagttgcatattcctcgtttgtatgactacttatggattgctgaagacggtatgagaatgcagggttacaatggatcacaattatgggatactgccttttctgtccaagctatcatgtctaccaaattgtcagaagaatacggtaccactttgagaaaggcccacaagtatattcaagattcacaagttcaagaagattgcccaggtgatccaaatgtttggtttagacatatacacaaaggtgcttggccattctccactagagaccatggttggttgatctctgactgtacagctgagggtttgaaggcctctttgatgttatctaagttgccttccaagatcgttggtgaaccattagaaaaggaaagattgtatgacgctgttaacgttttgttgtcattgcaaaacgaaaacggtggtttcgcctcctacgagttgaccagatcttatccatggttggaattaattaacccagctgaaaccttcggtgatattgttatagactacccatacgttgaatgtacttccgctgcaatccaggctttggctgcctttaagaaattgtacccaggtcacagatctaatgaaattggtaactctatagctaaagccgctgacttcattgaatcaatccaagcaacagatggttcttggtacggttcttggggtgtctgtttcacctacgctggttggtttggtattaagggtttagtcgctgctggtagaacttacaattcctgctcctctttgagaaaggcttgtgatttcttaatgtccaaggaattggcagccggtggttggggtgagtcctacttgtcctgtcaagataaggtttataccaacatcaaagatgatagaccacatttggtcaacactggttgggctatgttgtcattaatcgacgctggtcaagctgaaagagatcctacaccattgcaccgtgctgccagaatattgattaattcccaaatggaagacggtgactttccacaggaagagatcatgggtgttttcaacaagaattgtatgattacttatgcagcttatagaaacatctttccaatttgggcattaggtgaataccgttgcagagtcttacaagcctcttaa

SEQ ID NO: 189 - DNA, 2292 bp, Artificial Sequence
  Synthetic
atgtggaggctcaaagttggggcagaaagtgtaggagagaaggaagaaaaatggctaaagtccatatctaaccacttgggccgacaagtgtgggaattttgtgcgcatcagcctaccgcttcgccgaatcatcttcaacagattgacaatgcccgcaaccatttccgtaataatagatttcacagaaaacaatcatctgatttattcttagctatccaaaacgagaaggaaattgcaaatgtcacaaaaggtggtggtattaaagttaaggaggaagaggatgtcagaaaagaaacggtaaagaacactgttgaaagggccttgagcttttactcagctatacaaactaatgacggaaattgggcaagtgatctaggcggtccaatgttcctgttgccaggactggtaatcgctctatatgttacaggtgttttaaattccgtgttgagcaagcatcacagacaggagatgtgccggtatttatacaaccatcaaaacgaagatgggggatggggtctgcatatcgaagggacttcgaccatgtttggttctgcccttaattatgtggccttgagattattaggcgaggatgcggacggtggcgaaggcggtgctatgacaaaagcacgtagctggattctggatcgtggtggggcaacggctataacttcttggggaaaattgtggctttcagtgttaggagtctatgaatggtccggtaacaaccctttgcccccagaattttggctcttaccctactgtcttcctttccacccaggccggatgtggtgtcattgcagaatggtatatctaccgatgtcgtacttatatggtaaaaggtttgttggaccaatcacgcctatagtcttgagtttaaggaaggaactttatacaattccctaccatgaaatcgattggaatagatctcgaaatacttgcgctaaagaagacttgtactatccacatccgaagatgcaagatattttgtggggctcaatttatcacctgtatgaacctcttttcaccagatggcctggcaaacgcttaagggagaaagcactccaaatggctatgaagcacatacactacgaggatgaaaactctcgatatatatgtctcggtccagttaacaaagtcttaaatatgctatgttgttgggtggaggacccatacagtgacgcattcaaatttcatttgcaaagagttcctgattacctatgggtagcggaagatggaatgagaatgcagggttataatggctcccagctgtgggatacagcgttttctgtacaagccattatttcaactaaacttatagattcttttggtaccacattaaaaaaggcccatgatttcgttaaagactctcaaatccaacaagactgccctggggatccaaacgtctggttcagacatattcataagggggcttggcccttttccacccgggatcacggttggctaatttcagattgtacggctgaaggtttgaaggctagcttaatgctaagtaagttgcctagtaagattgtcggagaacccctcgaaaaatcgcgtttatgcgacgccgttaatgttctgttatcgttgcagaatgagaacggcggttttgcaagctacgaactcacgaggtcctatccatggctcgaactaatcaatccagctgagacatttggagatatagtgatagactatccgtatgtcgaatgtacctcagcaactatggaagcattgaccctcttcaaaaaacttcatccgggtcatagaactaaagaaattgacatcgcagttgctagagcggccaatttccttgaaaatatgcaaagaaccgacggttcatggtatgggtgctggggcgtatgttttacttacgctggatggttcggtataaaaggtttagtcgcagcgggtagaacatataatagttgtgtagctattcggaaagcctgtgattttttactttctaaggaattgcccggagggggttggggcgagtcctacttatcctgccagaacaaagtttatactaaccttgaaggcaatcgtcctcatctggttaacactgcatgggtgctgatggccttgatagaagctggccaggctgagcgtgatccagcaccattgcatcgtgcagcgaggttgttgattaattcgcaactagagaatggtgatttcccacaagaagaaataatgggagtgtttaacaagaactgtatgattacatacgctgcttaccgcaatattttcccgatctgggcactaggagagtattttcacagggtattaacagag

SEQ ID NO: 190 - DNA, 2292 bp, Artificial Sequence
  Synthetic
atgtggaggctcaaagttggggcagaaagtgtaggagagaaggaagaaaaatggctaaagtccatatctaaccacttgggccgacaagtgtgggaattttgtgcggaccagcctaccgcttcgccgaatcatcttcaacagattgataatgcccgcaaacatttccgtaacaatagatttcacagaaagcaatcatctgatttattcttagctatccaaaatgagaaagaaattgcaaacggtacaaaaggtggtggaattaaggtcaaagaggaagaggacgttagaaaggaaacggtgaaaaacactgttgaaagggccttgagcttttactcagctatacaaactaatgatggcaattgggcaagtgatctaggtggaccaatgttcctgttgccaggtctggtcatcgctctatatgtaacaggcgttttaaattccgtattgagcaagcatcatagacaggagatgtgccggtatttatacaatcaccaaaacgaagacgggggttggggactgcatatcgaagggacttcgaccatgtttggttctgcccttaattatgtggccttgagattattaggcgaggatgcggatggtggcgaaggtggtgctatgacaaaggcacgtgggtggattctggaccgtggaggggcaacggctataacttcttggggtaaattgtggctttcggtattaggagtttatgaatggtcaggcaacaaccctttgcccccagaattttggctcttaccctactgtcttcctttccacccaggtcggatgtggtgtcattgcagaatggtgtatctaccgatgtcatacttatatggtaaaaggtttgttggaccaatcacgcctatagtcttgtccttaaggaaggaactttatacaattccctaccatgaaatcgattggaacaaatctcgcaatacgtgtgctaaagaggatctatattatccacaccccaaaatgcaagatattttgtggggcagtatttaccatttatatgaacctctgttcactagatggccaggaaaacgcctgagagaaaaggcattgcagatggctatgaagcatatacactacgaagacgagaatagtagatacatttgcttgggtcctgtgaataaagttctgaacatgttgtgttgttgggtagaggatccgtacagtgacgcgtttaaattccatttacaaagagttccagactacctatggatagcagaagatgggatgagaatgcaaggttataatggctcgcagctatgggacacagctttttcagtccaagcaattatctctactaagctgattgattcttttggcaccactttgaaaaaggcacatgatttcgttaaagattctcagattcaacaggattttccaggtgacccgaatgtctggttccgacacatccacaagggtgcctggcccttttcaacccgagatcatggctggttgatatccgattgtacagccgaagggttaaaggcgagccttatgttaagcaagttaccttcgaaaattgtaggtgaaccattagaaaaaagtagactatgcgatgcagttaacgttcttttatcactacaaaatgaaaacgggggctttgctagctacgagttaaccaggtcatatccatggttggaattaataaaccctgccgaaacgttcggagacattgtgattgattatccatacgtagagtgtacctccgcaactatggaggctcttactctttttaagaaattacacccaggtcatcgtacaaaagagattgatacagcggtcgccaaggctgctaatttcctcgaaaatatgcaaagaaccgatggaagttggtacggatgctggggtgtctgttttacttatgccggttggtttgggattaagggtttggttgccgcagggcgcacatattccacttgcgtcgccatcagaaaagcttgtgatttcttgttgtcaaaagaattaccaggcggtggatggggtgaatcttatctatcttgtcaaaacaaagtctatactaatctcgaaggtaataggcctcatttggtgaatacagcttgggttctgatggccctcatcgaggctggtcaagcggaaagagatcccgcaccactacatcgtgctgcaaggctcttgatcaattcacaattagagaacggtgattttccgcaggaagaaatcatgggtgtattcaacaagaactgcatgataacctacgccgcttataggaatatttttcctatatgggctcttggagagtactttcatagagtgctaactgag

SEQ ID NO: 191 - DNA, 2295 bp, Artificial Sequence
  Synthetic
atgtggcgtttgaaggttggtgccgagtctgtcggcgaaaaagatgaaaagtgggttaaatccgtctcaaaccacttaggtagacaagtttgggaattttgcgcagacgctgccgctgatacccctcatcagttgttgcaaatccaaaatgctagaaaccacttccatcacaatagattccatagaaagcaatcttccgacttatttttggctattcaatacgaaaaggagattgctaagggtgccaaaggtggtgctgttaaggtcaaagaaggtgaagaagttggtaaggaagccgtcaagtctactttagagcgtgctttgggtttctattctgctgttcagacatcagacggtaactgggcttctgatttaggtggtccaatgtttttgttgccaggtttggttatcgcattacacgtcactggtgttttgaactccgtcttgtccaagcaccatagagttgaaatgtgtagatacttgtacaaccatcaaaatgaagatggtggttggggtttgcacatagaaggtacctctactatgttcggttctgctttgaattatgttgccttgagattgttaggtgaagacgcagacggtggtgatggtggcgctatgaccaaggctagagcatggatattagagagaggtggtgctacagctatcacttcatggggtaagttgtggttgtccgtcttaggtgtttacgaatggtccggtaacaacccattaccaccagaattttggttattgccttattctttgccattccatcctggtagaatgtggtgtcactgtagaatggtctacttaccaatgtcttatttgtacggtaagcgtttcgttggtccaattactccaaaagtcttgtctttgagacaagagttgtacaccattccatatcacgaaatcgattggaataaatcccgtaacacctgcgctaaggaagacttatactatcctcacccaaagatgcaagacattttgtggggttctatctaccatgtctacgaacctttgttcactagatggccaggtaaaagattgcgtgagaaggccttacaagcagctatgaaacatattcactatgaagatgaaaactcaagatacatctgtttgggtccagttaataaggttttaaacatgttatgttgttgggtcgaagacccatactccgatgccttcaagttgcacttgcagagagtccacgattacttgtgggttgctgaagacggtatgagaatgcaaggttacaatggttcccaattatgggataccgccttttctattcaagctatagtcgcaactaagttagttgattcttacgcacctactttgcgtaaggctcatgacttcgtcaaagactcacaaatccaagaagattgtcctggtgacccaaatgtttggtttagacacattcataagggtgcctggccattttccacaagagaccacggttggttgatttcagattgtacagctgaaggcttaaaggcttctttgatgttgtctaagttaccttccactatggttggtgagccattggaaaagaacagattgtgtgatgctgtcaacgttttattgtctttgcagaacgacaacggtggtttcgcttcttatgaattaaccagatcctacccatggttggaattgataaatccagctgaaactttcggtgacattgttatcgattacccatatgttgaatgcactgccgccaccatggaagctttgactttattcaaaaagttgcaccctggtcacagaacaaaggaaatcgataccgcaatcggtaaagctgctaacttcttagagaaaatgcaaagagccgatggttcttggtacggttgttggggtgtttgttttacttacgctggttggttcggtattaagggtttggttgcagctggtcgtacctataattcttgcttggctattagaaaggcctgtgaatttttgttgtccaaggaattgccaggtggtggttggggtgaatcttacttgtcctgtcaaaacaaagtctacaccaacttggagggtaacaagccacatttagtcaacaccgcttgggttttaatggctttgatcgaagctggtcaaggtgaaagagatccagctcctttgcatagagcagcccgtttgttaatgaactcccaattggaaaatggtgattttgttcaacaggaaataatgggcgttttcaataaaaactgtatgattacatatgctgcctatagaaatatcttcccaatttgggctttgggtgaatattgccacagagtcttaactgaataa

SEQ ID NO: 192 - DNA, 2322 bp, Artificial Sequence
  Synthetic
atgtggaggctcaaagttgggaaggaaagtgtaggagagaaggaagaaaaatggataaaatccatctctaaccacttgggccgacaagtgtgggaattttgtagcggtgagaatgaaaatgacgatgatgaggcaattgcggttgccaacaattcagcttctaagttcgaaaatgctcgtaaccattttcgcaataatagattccatagaaaacagtcgtccgacctatttttagcaattcaatgcgaaaaggaaatcattagaaacggtgccaaaaacgagggtacaaccaaggtcaaagaaggagaagatgtaaaaaaggaagcagtgaagaatacgctggaaagggctctttcgttttattcagcggttcaaacttcagatggcaattgggccagtgacctaggtggacctatgttcttattgccaggtttagttatagccttgtacgtcactggcgtacttaactcagttttgtctaaacaccatagacaggagatgtgtaggtatatttacaaccatcaaaatgaggatgggggttggggtttgcacatcgaaggttctagtacaatgtttggctctgctctcaattatgtcgctttaagacttttgggtgaggcagcagatggtggggaacatggggctatgactaaagcacgaagctggattttagaaagaggaggtgctaccgcgataacttcgtggggaaaactgtggctttccgtgttaggcgtttatgaatggtctggaaataatcccctaccaccggaattttggcttttaccttactccttgccattccatccgggtcggatgtggtgccactgtcgtatggtctacttgcctatgagctatctgtatgggaagcgcttcgttggaccaataacacctatcgtgctctcactcagaaaggaattatacacgattccctatcatgagattgattggaaccggagtcgaaatacctgcgccaaagaagatttatattatccacatccaaaaatgcaggacattttatgggggagtatctaccatgtatacgaacctctgttttctggttggcccggcaaacgtctaagggagaaggccatgaaaatcgctatggaacacatacactatgaagatgagaatagcagatacatttgtttgggacccgttaataaggtactgaacatgctatgttgctgggttgaagacccttattcagatgctttcaagtttcacctacaaagaatcccagactacctctggttggcagaagatggtatgaggatgcaaggatacaatggttcacaattgtgggatacagctttttcaatacaagctattatctcaacaaaattaattgacacatttggcccaactcttcgtaaagcgcatcatttcgtaaaacactctcagatacaagaagactgtcccggcgatccgaacgtttggtttagacatatccataaaggagcctggccattttccactagagatcatggttggctgatttcggactgcaccgcagaaggcctaaaagccagtcttatgctctctaagttgccttctaagatagtcggtgagcctttggaaaagaatagattatgtgacgccgtcaatgtgctgttgtctttacagaacgagaatggtggcttcgcaagctatgaattgactagaagctatccatggctggagctgattaaccctgctgaaacattcggcgatattgtcattgattatagttacgtagaatgtacctctgcgactatggaggcattagctttattcaaaaagttacatccaggacaccggacgaaagaaattgacgcagccatcgcgaaagccgctaatttcctagaaaacatgcaaaaaacagatggttcatggtatggttgttggggtgtgtgttttacctatgctggctggtttggtataaaaggtttagttgccgcaggtcgcacctataataattgcgttgctatacgtaaggcttgcaactttctattatccaaggaattgccgggtggcggatggggagaatcttatttgagttgtcaaaacaaagtttacactaacttagagggtaacaaaccgcaccttgtaaatacggcttgggtcatgatggcattaatcgaggcagggcagggtgaaagggacccagcccctttacatagagctgcaagattgttaattaacagtcaattagaaagtggtgatttcccacagcaggagattatgggcgtgtttaataaaaactgtatgatcacatacgccgcttacagaaacatatttcctatatgggcattaggggagtattcacatcgtgttcttgatatg

SEQ ID NO: 193 - DNA, 2172 bp, Artificial Sequence
  Synthetic
atgtggcgtttaaagttgggtaaaggagagaacgaagattacttgttttctaccaatgacttcatcggtagacaaacttgggaatttgatcctaacgctggtacaccacaggaaagagcccaagttgaagctgcaagattaaatttctatcaaaacagaaaccacgtccaatgttcatccgacttgttgtggagattccaatttttggaagagaagaacttcaaacaagctataccaaaggtcgttgttgaagaacgtaatggtaacgatagagaattatctattaagaaggagaccgttaagactgccttgagacgtgctactaacttctttgctgcattacaatccaatcatggtcactggccagctgaaaatgccggtccattgtactatttgcctccattggtcttcgctttgtacattactagagacttgaacaccatcttgtctaaagaacatcaaaaagaaattttaagatacgtttattgccaccaaaatgaggatggtggttggggtttgcacatcgcttctcgtcagtcatgtatgttatgtactgtcttgaactacattgaattaagattattgggtgaagaagctgataacgaagcatgctccagagccagaaagtggatattggaccatggtggtgctttgtacatcccatcttggggtaagatttggttgtctatcttgggtttatatgaatgggaaggtaccaaccctatgccaccagagatttggatgttcggtaagatattgccatggaacttgggtggtttgttatgttacacaagattaaccttattgccaatgtcctacttgtatggtaagagatttgttggtcctttgaccccattaatcttacagttgcgtcatgaaatttacactcaaccatataatgacatcaaatggtcaccagctagacacttgtgtgccaaggaagatgaatacttcgaaagatctattttccagaagttagtttgggacgtcgttacatacgtcggtgaaccaatcttgaagtcctgggcttttaagaaaattagaaatcgtgctatacaaatcgccaagtggtacatggactatgaggatcaaaactcacattacatcactattggttgtgttgaaaagcctttgtttactttgacatcttgggttgtcgatcctcacggtgaagcatataaaaagcatttagctagaataaaggactacttgtgggtcggtgaggacggtatgaagatgcaatcattcggttcccaatcttgggatgttgcatttgctattcaagctattttggctaccaacttacaccacgaattttctgaaactttaaaaaaaggtcacgacttcatcaaacaatctcaagttaagaagaatccatccggtgatttcccaagaatgtacagacatatctccaaaggttcttggaccttttcagatcaggatcacggttggggtgtctccgactgtgctgctgaaaacttgttgtgctgtttgaagttgtctactatgccttcccatattgttggtgattctatggaaccacaatgtttctttgaagccgttaatttcatattgtcattacaagccaaagacggtggtttgtctgcctgggaaccagctggaacattgcctttgtggtttgaagttttgaatcctgttgaatttttcgagtacactgttttggaaattgagtgtgtcgaatgtacttcctctgccattcaagctttggtcttgtttaagaagttgttcccatcccacagaaaaaaagaaattgataacttcatcgaaaaggccaccaattatattaaggaaatccaaaaggaggacggttcttggtatggtaactggggtatttgtcacatctacggtacttacttcgctataaaaggtttagctgctgctggaaatacttacgaaaattgctccaccgtcactaaggctgtcgatttcttgttgaagatccagtgtccagacggtggttggggtgaatctcatatctcttgcttgaacaaagtccatactccattaccaggtaacgcatctaacttggttcaaacctcattcgctttgatgtctttaatccactcccaacaagtctgtttttttttattcttcttcttcccatcatttttaccaatttgcactttgccttccttgataattatcttctaa

SEQ ID NO: 194 - DNA, 2298 bp, Artificial Sequence
  Synthetic
atgtggcgtttaaaggtcggtgctgacacagttccagccgatccttctaaatcaggcggttggttgtccactttgtctaatcatttgggtagacaggtttgggaattttgtgcagagttgggttccccagaagatttacaacaaatacaacacgctagacaacacttctctgaccatagattcgaaaagaagcactctgctgacttattgatgagaatgcaatttgccaaagaaaactcatcattcgtcaacttgccacaaatcaaggttaaggataaggaagatgtcatggaggaagctgttaccagaactttgaaacgtgctattaatttttactccaccatccaggccgatgacggtaactgggcatctgacttgggtggtcctatgttcttgttaccaggtttggtcattgctttgtatgttactggtgttttgaactctgttttgtccaccgaacatcaaagagaaatttgcagatacttatacaatcaccaaaacagagatggtggttggggtttacacatcgaaggtccatccaccatgttcggttctgttttaaattatgtcactttgagattattgggtgaggaagctgaagacggtgaaggtggtgttgacaaggccagaaaatggatcttagatcatggtggtgctacagctataacttcatggggtaagatgtggttgtccgtcttgggtgtctatgaatggaccggtaacaatccattaccacctgaattgtggttgttgccatacttgttaccagttcacccaggtagaatgtggtgtcattgtcgtatggtttacttaccaatgtgttacttgtatggtaagcgttttgtcggccctattaccccaattattagatctttgagaaaggaattgtacttggttccataccacgaggtcgattggaacgaagctagaaacttatgcgccaaagaggatttatattaccctcatcctttggtccaagacatcttgtgggcttctttacaccacgtttacgaaccattgttcatgagatggccagctaagcgtttgagagaaaaggcattaagaactgttatgcaacatattcactatgaagacgaaaattcccgttacatctgtttgggtccagtcaacaaagttttaaacatgttgtgttgttgggttgaggatcctcattctgaagccttcaagttgcacatcccaagagtctatgattacttgtggattgcagaggacggtatgagaatgcaaggttacaacggttctcagttatgggatactgctttctccgttcaagctataatttccacaaagttggctgaagaatacggtaccactttaagaaaggcccacgaatacatcaaagactctcaagtcttggaagactgtccaggtgaccctaacgtttggtttagacacatacacaagggtgcttggccattttcaactcgtgatcatggttggttgatttctgattgcaccgctgaaggtttgaaggcatcattgatgttgtctaaattgccatctaaaattgtcggtgaaccattagaaaaagaaagaatctatgattcagttaatgtcttattgtctttacagaatgagaacggtggtttcgcttcctatgagttgacaagatcctacccatggttggaattaattaacccagctgaaacttttggtgacatcgttatagactacccttacgttgaatgtacttccgccgctatccaagctttggccgcttttaagaagttatacccaggtcaccgttctaacgaaattggtaactgtatcgccaaggctgccgatttcattgaatccatccaagctaccgatggttcttggtatggctcttggggtgtttgtttcacatacgcaggttggttcggtattaagggtttggttgccgctggtagaacctacaacaattgcttgtcattgagaaaagcttgtgattttttgttatctaaagaattagccggtggtggttggggtgaatcctatttgtcctgccaagataaggtctacactaacattaaagatgacagacctcatattgtcaataccggttgggctatgttgtctttaatagaggttggtcaagctgaaagagacccaacaccattgcacagagccgcacgtatattgattaactcacaaatggacgacggtgattttcctcaagaagagatcatgggtgttttcaacaagaattgtatgatcacttacgcagcttacagaaacattttcccaatttgggctttaggtgaatacagatgtagagtcttgcaagctccataa

SEQ ID NO: 195 - DNA, 2358 bp, Artificial Sequence
  Synthetic
atgtggcgacttaaggtcggcaaagagtccgtgggagaaaaggaagaaaagtggataaaatcaatcagtaaccacctgggtcgtcaggtttgggaattttgtgccgagaatgacgatgacgatgacgatgaagcagttattcatgtcgtagctaacagctctaagcacctattacaacaacaaagaagacaatcttctttcgaaaacgctaggaagcaattcagaaataatagatttcatagaaaacaaagttccgatctcttcttgaccatccagtacgaaaaggaaattgctcgcaacggtgcgaagaacggtggtaatactaaggttaaagaaggtgaagacgtcaaaaaggaagctgttaacaatacgttggagagagccttgagcttctattcggctattcaaactggtgatggtaactgggcaagtgatttgggcggtccaatgttcttgttacctgggttggttatcgctttatacgtcacaggtgtgttgaactccgttctatctaagcaccatagacaagaaatgtgcagatatatctacaaccaccaaaatgaagacggtggatggggtttgcatattgaaggttcatctaccatgtttggtagtgcccttaactacgtagctttgcgtttattgggtgaagacgctaacggaggtgagtgtggtgcaatgactaaggctagatcctggatactggaaaggggtggggccacagctattacttcttggggtaagctctggttgtccgttctaggtgtctacgaatggtctggcaataatcccttaccaccggaattttggttgttaccatattctttgccattccacccaggtagaatgtggtgtcactgccggatggtctacttgcctatgagttatctatacgggaaaagatttgttggtccaattaccccaatggtgttgagcctaagaaaggagctttacaccattccctatcatgaagttgactggaacagatctcgtaacacttgtgcccaagaggatttgtactacccacacccaaagatgcaggacatcttatggggttccatttatcatgtttacgaaccgctattcaacggttggcctggtagaagattgagggaaaaagctatgaagatagcgatggaacacatccactatgaagatgagaactctcgttacatctgtttgggtccagtcaacaaagtcttgaacatgctgtgttgttgggtcgaagatccatactctgacgctttcaagtttcacctgcaacgaatccccgattatttgtggttagctgaagatggcatgagaatgcaaggttacaatggttcacaattgtgggacacggccttttccattcaagctatattatccactaaattgattgacaccttcggttccaccttgagaaaggctcatcattttgtgaagcattctcaaattcaagaagattgtccaggcgatccaaacgtttggttcagacacatccataagggtgcttggccgttctcaactagagaccacggttggctaatttcagactgtacagccgaaggacttaaggcgtctttaatgttgtctaaattgccttctaaaatcgttggtgaaccattggaaaagaatagattgtgcgacgctgttaatgtattgctttccttgcagaacgagaatggtgggttcgcttcttacgaattgactagatcctatccatggttagaactcattaaccccgcagaaaccttcggtgacatcgttattgattacagctatgtcgaatgtacgtcagccactatggaagctttggccctctttaagaaactccatccaggtcacagaacaaaggaaatcgacgctgctcttgccaaggcggctaacttcttagagaatatgcaaaggacggatggttcttggtacggttgctggggtgtgtgttttacctacgcaggttggttcggcatcaaggggctagtggctgctggtaggacttacaacaactgtgttgccatcagaaaggcttgtcatttcttgctaagtaaagagttgccaggtggtggttggggagaatcctacctcagttgccaaaataaggtttatactaacttagaaggaaacagaccacacctagtcaataccgcctgggtattgatggcattgatcgaagctggtcagggtgagagagatcctgctccactgcatcgcgccgctagattgttgattaactcgcaattagaaaacggtgattttccacaacaagaaattatgggtgttttcaacaaaaactgtatgattacttacgctgcttatcgaaatatatttccgatttgggccttaggtgaatactcgcaccgtgttttgactgaataa

SEQ ID NO: 196 - DNA, 2295 bp, Artificial Sequence
  Synthetic
atgtggcgtttaaaagtcggagccgagtcagttggcgaaaaggatgaaaagtgggtaaagtccgtgtctaatcacttgggtcggcaggtttgggaattttgtgctgacgcagacgctgtcaccccacatcaaagtctacaaatccacaacgctaggaaccatttccaccaaaatagattccgtagaaaacaatcctctgatctgtttttggcgattcaatacgaaaaggaaatagccaagggtgttaaagttggtgctgtcaaggttaaggagggtgaagaagttggtaaggaagctgtaaaatctactcttgaaagagcattatcgttctatagcgctgtccaaacgtcggatggtaactgggcctctgacttgggtggtcctatgttcctcttgccagggttggtcattgctttgtacgtcactggtgttttaaactccgttctatctaagcatcacagattggaaatgtgcagatatctttacaaccaccagaatgaagacggaggttgggggttgcatatcgagggtacatccaccatgtttggatcagctttaaattacgtggcattgagattgcttggtgaagatgctgacggtggtgatggtggtgccatgactaaggctagagcctggattttggaacgaggcggtgctaccgctattacttcttggggcaaattatggctgagtgttttgggtgtgtatgaatggtctggtaacaatcccctaccaccggaattttggttgctcccatactctctaccattccatcctggtagaatgtggtgtcactgtagaatggtttacttaccaatgtcctacttgtatggaaaaagattcgtcgggccaatcacccctaaggtcttgtccctaagacaagagttgtacaccgtaccataccatgaaatcgattggaacaaatctaggaacacatgtgcaaaggaggatttgtactatccacacccaaagatgcaagacatattatggggttcaatttatcatgtgtacgaacccttgtttactagatggcctggtaaaagattacgtgaaaaggctttgcaaactgcgatgaagcacatccactatgaagatgaaaacagcagatacatatgtttgggtccagttaataaggttctgaatatgttatgctgttgggttgaagacccatacagtgatgctttcaagttacacttgcaacgcgtccacgactatttgtgggtcgctgaagatggtatgagaatgcaaggttataacggttcgcaattgtgggacacagccttcagtattcaggcaatcgtcgctactaaacttgtcgattcatacggccccactctacgcaaggctcatgactttgttaaagattcacaaatccaagaagactgtccaggtgacccgaacgtttggtttcgacatattcacaagggtgcttggccattctctacaagagatcatggttggttaatttccgactgtactgccgaaggtttgaaagcgtctttgatgttgagtaagttaccatcaaccatggttggagaacctttggaaaagtctcgactatgcgatgcggtaaacgttctgttgtcccttcaaaatgataacggtggttttgcttcttacgaattgaccagatcgtacccatggcttgagctaattaatccagctgagacattcggtgatatcgtaatcgactacccatatgttgaatgtaccgcagccactatggaggctcttacgttattcaagaaattacatccgggccacagaactaaggaaattgacaccgctatcgctaaagccgctaattttttggaaaagatgcaaagaactgatggttcttggtatggttgttggggtgtttgtttcacttacgctggttggttcggaatcaagggtctcgtcgctgctggtcgtacatataactcctgcgtagccattagaaaagcttgcgaatttttgttatctaaggaacttccaggtggtggctggggcgagtcttacttgtcctgtcaaaacaaggtctacaccaatctcgaagggaacaagcctcacttggtcaacactgcatgggttttaatggccttgattgaagctggtcagggggagagagatccggctcccttacacagagccgccagattgttgatgaactcgcaattagaaaatggagacttcctccaacaagaaatcatgggggttttcaataaaaactgtatgataacgtacgccgcttacagaaacatattcccaatttgggcgttgggtgaatactgtcaccgcgtcttgacggaataa

SEQ ID NO: 197 - DNA, 2298 bp, Artificial Sequence
  Synthetic
atgtggcaattaaaggttggtgccgatacagtcccttccgacccatctaacgctgggcgttggttgtctaccttgaataaccatgttggtagacaggtctggcactttcacccagagttaggttcaccagaagatttgcaacaaatccaaaatgcaagacaacatttctacgaccacagattcgaaaaaaagcattcctctgacatattgatgagaatgcaatttgctaaagaaaactcttcattcgttaacttacctcaaattaaggttaaggaaaaggaagatgtcgttgaagaggctgttactcagactttgcgtagagccatgaatttctattccaccatccaggctgatgatggtcactggccaggtgactacggtggtccaatgtttttgttgccaggtttggtcattactttatctattactggtgctttgaacgccgttttatcaaccgaacatcaaagagaaatctgccgttatttgtacaatcaccaaaacagagatggtggttggggtttgcacattgaaggtccatccacaatgttcggttctgtcttgtcctacgttaccttgagattattgggtgaagaagctgaggacggtcaaggtggggtcgaaaacgcaagaaaatggatattggatcatggtggtgctacagctattacttcttggggtaagatgtggttatcagtcttgggtgtttatgagtgggctggtaataaccctttgccacctgaattgtggttattaccatacttattgccatttcacccaggtagaatgtggtgtcattgtagaatggtctacttaccaatgtgttatttgtacggtaagagattcgttggtcctatcactccaatcatcagatctttgagaaaagaattgtacttggtcccataccacgaaattgactggaacgaagccagaaatcaatgcgctaaggaggacttgtactatcctcatccattggttcaagacgttttgtgggcttccttgcaccacgtttacgaaccattattcatgagatggccagctaaacgtttacgtgaaaaggccttaagaaccgtcatgcaacacattcattacgaagatgaaaacaccagatatatctgtattggtcctgttaataaggttttgaacatgttgtgttgttgggttgaagacccacactctgaggcttttaagttacatataccacgtatttatgattacttatggttggcagaagatggtatgaagatgcaagggtacaatggttctcaattgtgggacactgccttcgcagtccaggctattatgtccacaaagttggttgaagaatatggtactactttgagaaaggcccacaaatacattaaagattcacaagtcttggaagattgtccaggtgacttgcaatcttggtacagacatatatccaagggtgcttggccattttctaccgctgatcatggttggcctatctccgattgtactgccgaaggtttgaaggctgttgtcttgttgtctaagttaccttccgagattgtcggtaaaccagttgacgaagagagaatgtacgacgccgttaacgttatcttatctttacagaacacagacggtggttttgctacctatgaattaaccagatcctatagatggttggaattgatgaacccagctgaaaccttcggtgatatagttatcgattacccatatgtcgaatgcacttccgcagcaattcaagctttagctgctttccgtaagttgtatccaggtcacagatctaatgagatcggtaactgcattgctaaagccgcagatttcatagaatctattcaagctactgacggttcttggtacggttcttggggtgtttgttttacctatggtggttggtttggtatcaaaggtttggttgccgctggtcgtagatacgaaaattcttcttcattgagaaaggcttgtgattacttattgtccaaggaattgccagccggtggttggggtgagtcatacttgtcatgtcaagacaaagtctacaccaatattaaggatgatagaccacacttagttaacaccgcttgggctatgttatcattgatcgacgcaggtcaagctgaaagagacccaactccattgcatagagccgccagaattttaatcaactcccagatggaagatggggatttccctcaagaagacatcatgggtgtctttaataaaaattgcatgatatcttattctgcttacagaaacatcttccctatttgggcattgggtgcttatcgttgtcgtgttttgttggcttcttaa

SEQ ID NO: 198 - DNA, 2298 bp, Artificial Sequence
  Synthetic
atgggtgaaatgtggaaattgaagttttctaagggttgggagacctcagaaaacgatcacgttgggcgtcaatattgggaatttgacactaatttaactccttccgaagaagaaaaggcacagatacaaaaattctacaacgaattttacaactatagattccaagccaagcattcttccgatttgttaatgagattccaattgagaaaggagaataacggtggtgaagtcaaattgccaacacaaatcaagattaccggtgaagaagagattaacgaagaagctatcgaaaagaccttaagacgtggtattagattctactctacattgcaaactcaagacggtttttggccaggtgactacggtggtccattgttcttgttgccagctttagttattggtttgtctgtcactaaggctttggatactgctatatcagttcaccatagacacgaaatgtgtagatacttatataatcatcagaacgaagacggtggttggggtttgcacatcgaaggtaattccactatgttgtgcaccgcattgtcttatgtctctttaagattattgggtgagaagatggatggtcgtgatggtgttttgttaaaagccagaagatggattttagacagaggtggtgctacatccatcccttcctgggggaagacttggttgtctgtcttgggtgtttacgaatgggaaggtaacaatccattgccaccagagatctggttgttaccatactcattacctttgcacccaggtagaatgtggtgtcactcaagaatggtttatttgccaatgtcttacttgtatggtaaacgtttcgtcggtcctatttctccaataatcatttctttgagaagagaattgtacacctgttcctaccatacaatcgactggaacttatctcgtaacttatgtgctaaagaagatttgtacaccccacattctaagattcaaaatatattgtggaactccatccacaagtttggtgagccattgttaaagaaatggccattgtccaaggttagacaaaaagccttggatttcgtcattcaacatatccattacgaagacgaaaacacccactacttgtgtttaggtcctatttctaaggttttaaatatggtttgctgttgggctgaagatcctaactcagaagcattcagaagacatatcccacgtattaaagattatttgtggttggctgaagacggtatgaagatgcagggttataacggttctcagttgtgggacgtcgtctttgctgttcaagccatcttagctactgatttagttgacgagtacggttctgttttgaagaaggcccacaacttcataaagaactctcaaatgaagagaaatgggattaaagaccaaaacaacccatccgtttggtatagacacatgtctaaaggtggttggccattctcaactcctgataacgcttggccagtctccgactgcacagctgaagctttgaaggcagctatcttgttgtcacaaatgcctactaccatggttggtgaaccaattgatgtccacaatttgtacgatgctgtcaacttgattttgtcattgcaaaactccaatggtggttttgcatcctacgaattgaccagatcctatccatggttggaaatgttaaacccagccgaaatatttggtgatgttatgatagactaccaatacgttgaatgtacttctgctgccattcaaggtttgaaagctttcatgaagttacacccaggttatcgtaagaaagacattcaaacttgtatctctaaggctgctcacttcattgaaactatccagttgccagatggttcctggtacggttcctggggtatctgctacacttacggtacctggtttggtattaagggtttggttgcctgtggtagaacctacgctaactctaaatgtatccgtaaggccacacaatttttgttgtctaaacaattgaagtcaggtggttggggtgaatcatacttgtctgctcatcacaaggtctatgcagatttaaaagacggtaagtctcacattgtcaatacctcttgggcattattagctttgattcaagccgaccaagctcaaagagatccatctcctttgcatagagctgccactgttttaattaattcacaaatggatgatggtgacttcccacaacaagaaatcatgggtgtttttaataagtcttgtatgatttcctatgctgcatacagaaatatcttcccaatctgggctttaggtgaatacagaatcagagttttacaattgcctgagaactaa

SEQ ID NO: 199 - DNA, 2301 bp, Artificial Sequence
  Synthetic
atgtggagattaaagattggtgccgacactgtaccatccgatcccagcaacgctgggggttggctgtcgaccctatcaaatcatcttggaaggcaggtgtgggagttttgcgctgaattgggttctccggaagatttgcaacaaatccaacaagcacgtcaaagattctctgaccacagattcgaaaaaaagcactccgctgacctcttgatgcggatgcaatttgccaaggaaaactctagtttcgtcaacttgcctcaggttaaagttaaggataaggaagaagtctctgaagaagctgtcacaagaactttgcgaagagcaattaatttctattccacgatacaagctgatgacggcaactgggcctcggatttaggtggtccaatgtttttgttaccaggtttggttatcgctctctacgttaccggcgttttaaattccgtgcttagtactgagcatcaaagagagatttgtagatacttgtacaaccaccaaaaccgtgatggtggttggggattgcacatcgaaggtccatctaccatgttcggttctgtgttgaactatgtcactcttagactactgggtgaagaagccgaagacggtcaaggtgctgttgacaaggctagaaaatggatattggatcatggtggggccgcggcgattacatcatggggtaagatgtggctatccgttctgggtgtctatgagtgggctggcaataatccattgcctccagaattgtggttattaccttacctcttgccatgtcacccaggtagaatgtggtgtcactgtagaatggtttacttgccaatgtgctacttgtatgggaaacgttttgtcggtccaatcaccccaattatccggtctttgagaaaggaactctacttggttccctaccatgaagttgattggaataaggcaagaaaccagtgtgctaaggaagatttatattacccacatcctctagtacaagacatcttgtgggcttctttacatcacgtctatgaacctttgttcatgcactggccagctaaaagacttagagaaaaggctttacaatcggttatgcaacacattcattacgaagatgaaaacagcaggtatatatgtctgggtccagtaaacaaagttttaaatatgttgtgctgttgggccgaagacccacattccgaagctttcaagttgcacattccgagaatttacgactacctatggatcgctgaggacggtatgagaatgcagggttacaacggttctcaattatgggacactgcgtttagcgtccaagctattatcagtacagaattggccgaagagtatgaaactacccttagaaaggcccataagtacataaaagattcacaagtcctagaggattgtccaggagatccaaacgtttggttcaggcacattcacaagggtgcatggcctttctctacaagagaccacggttggttaatttccgactgtaccgctgaaggtttgaaggcttctctcatgttatccaaattgccttcgaagatcgtaggagaaccactagaaaagcaacaactgtacaatgctgttaacgtgttgttatccttgcagaacgagaacggtggcttcgcatcttacgaactaactcgttcttacccatggttagaactaattaatcccgctgaaacgtttggtgacatcgtgattgattatccgtacgtcgaatgctcctctgctgcaatccaagctttggccgcctttaaaaaattgtacccagggcatagaagagacgaaatcaacaattgtattgccaaggctgctgatttcatcgaatctattcaggctactgatggtagttggtatggttcctggggtgtctgtttcacgtacgccggatggtttggtattaagggtctagtcgcggccggtcgcacttacaacaactgctcttcattacggaaggcttgtgatttcttgctaagtaaggagttggctgctggtggttggggtgaaagctatctctcttgtcaaaataaggtttacaccaacattaaggatgaccgcccacacatagttaatactggttgggctatgttgtcacttatagacgcagggcaatccgagagagatccaacccctttgcacagagctgcaagagttttgataaattcccaaatggaagatggtgattttccacaagaagaaatcatgggtgtttttaacaaaaactgtatgatcacatatgctgcctacagaaacattttcccaatatgggctttgggggaatacagatccagagttttaaaattattaaagtaa

SEQ ID NO: 200 - DNA, 2289 bp, Artificial Sequence
  Synthetic
atgtggcgtttgaagatcgctgacggtggcaacgatccttatatttactccacaaatgattttataggtagacagacttgggaatttgacccagaggccggtaccccagaagaaagacaagaagttgaagaagcaagacaccatttctacagaaaccgttataaagtcaagccatctgctgattgtttatggagaatgcaattcttgagagaaaagaaattcaagcaagagatcggtgctgtcaaaattaaggaaggtgaagaaatttctcaagacaaggccagaatcgctttacgtagagccgttcacttctactcagctttgcaagcttctgatggtcattggccagcagaaaatgctggtccattgttttttttacctccattggttatgtgcttgtacataactggtcacttagaccaagttttccctgaagaacataagaaagaaattttgagatacatctattgtcaccagaacgaggatggtggttggggtttgcatattgagggtcattccaccatgttctgtactgccttgtcctacatttgtatgagaatcttgggtgaaggtccagacggtggtttaaacaatgcttgtgctagaggtagaaagtggattttagatcacggttctgtcacctacatcccatcttggggtaagacctggttgtccattttgggtgtttacgactgggctggctcaaacccaatgccacctgaattttggttattgccatctttcttgccaatgcacccagccaagatgtggtgctattgtcgtatggtctatatgcctatgtcctacttgtatggtaaaagatttgtttgtcaaatcactcctttaattcaagaattgagattggagttacatgctcaaccattcgatgaaataaactggaagaaaactagacacttatgtacaaaagaagatgtttattacccacacccattgatgcaagatttgttgtgggactcattatacatttgtactgaacctttgttaaccagatggccattcaataagttggtcagagagaaggctttgcaagttacaatgaaacacatccattatgaagacgataactctcgttacatcaccatcggttgcgtcgaaaaggttttgtgcatgttagcatgttgggtcgaagatccagatggtgactacttcaagaaacacttggcacgtattcctgactacatttgggttgccgaggacggtatgaaaatgcagtcctttggttctcaagaatgggacactggtttcgctatccaagctttattggcagctgatatggctgacgaaataggtccagttttggctagaggtcatgattttattaagaagtctcaggtcaaggataatccatctggtaacttcaagaccatgcacagacatatatcaaaaggttcttggactttctccgaccaagatcacggttggcaagtctccgactgtaccgccgaagccttgaagtgctgtttgttgttctcattaatgagaccagaaattgtcggtgacaagatggaagctcaaagattgtatgactctgttaacgttttgttgtctttgcaatctaaaaatggtggtttggcagcttgggagcctgctactggtcaaaagtggttggaaatgttaaacccaacagaattttttgctgacattgttatcgaacacgagtacgtcgagtgtaccgcctcagctatccaagctttgatcttgttcaagaagttacatccaggccatagaactaaggaaattgataactttattcaaaatgctgtcagatacttgcaggatatccaaatgccagatggttcttggtacggtaactggggtgtttgtttcacctatggttgctggtttgccttaggtggtttagttgccgcagctaagacattcaataactgtgccgctataagaaaaggtgttcatttcttgttgaacattcaaatgccagatggtggttggggtgaatcctaccactgttgcccatctaagaagtatgtcccattggaaggtaagcgttcaaatttggttcacactgcctgggctatgatggccttgatccactctggtcaagctgaaagagatcctactccattgcatcgtgctgcaaagttattaattaattcccagacagaagatggtgatttccctcaacaagaaattaccggtgtttttatgaaaaactgtatgttgcactatgctgcatacagaaacatctacccattgtgggctttagctgaatactctaaaagagttaagttggcttcaacttctccataa

SEQ ID NO: 201 - DNA, 2289 bp, Artificial Sequence
  Synthetic
atgtggcgtttaaaagtcgcagacggtggcaacgatccatacatctattccatgaataactttgttggtagacaaatatgggaatttgaccctgatgctggttctccagacgagagagctgaagttgaaagagtcagaaatgaatttacaaagaaccgtttgaagggtttcccatcagccgatttgttatggagattgcagttgttaagagaaaaaaatttcaagcaatctattccacctgttaaggtcgaagacggtgaggaaattacctacgaaatggcctccgatgctatgaagagaggtgcttatttcttggaagcaatccaagcttctgatggtcactggccttccgagacttctggtccattgttctacttgtgtccattattgatttgcatgtacatcatgggtttcatggattcagctttttctccagaacataagaaagaaatgatgagatatttatacaaccaccaaaacgaagacggtggttggggtttgcatgttggtggtcactcaaacatgttctgtactaccttcaactacatttccttgagattgttaggtgaggaaccagatgttgaagccgtcgctaaaggtcgtatctggatcagagaccatggtggtgttacttctattttgtcctggggtaagacctggttgtctatattgaatttgttcgactggtctgcctctaatccaatgccacctgaatattggatgtttccaacatgggtccctattcacccatccaatatgatgtgttacactagaatcacctacatgccaatgtcatatttatatggtaagagatttcaagctccattgactccattagttttacaattgcgtgatgaattgcacactcaagcttacgaaaagattaactggagaaaggttagacacatgtgtgcaaccgaggacttgtacttcccacatccattcgttcaggacttattatgggatactttgtatatgttgtctgaacctttaatgacccgttggccatttaataaattgatcagacaaaaagctttggatgaaacaatgagacatattcattacgaggatgaaaactctcgttacataacaattggctgcgtcgaaaagccattgtgtatgttagcctgttgggtcgaagacccaaactctgaatatgttaaaaagcacttcgcaagaatacctgattacttgtggatggctgaagacggtatgaagatgcaatcctttggttcacaatcctgggatgccgctttggctatgcaggctttgttggcctgcaatatcactcacgatattggttcagctttgaacaacggtcacgaatttattaagaactctcaagttagaaataaccctccaggtgactacaagtccatgttcagatatatgtccaagggttcctggaccttctctgactgtgatcatggttggcaagtttcagactgtactgctgaaaatttaaaatgttgtttgttgttatccttgttgccacctgagatcgtcggtgaaaagatggagccacaaagattctacgatgctgttaacgtcatcttgaacatgcaatctaagaacggtggtttacctgcctgggaaccagcatcttcttactactggatggaatggttgaacccagtcgaatttttagaagatttgatcattgaacaccaacatgttgaatgtacctcttcagctttgcaggctattttattgttcagaaaacaataccctgagcacagaaagaaggaaatcaataacttcattaacaaggcagtccaatttttgcaggacatacaattgccagatggttcctggtatggtaactggggtatctgctacacctacggtacttggttcgctttgaaagctttgtcaatggcaggtaagacatatgagaactgtgaagctttgcgtaaaggtgccaattttttaattaagatccaaaacccagaaggtggtttcggtgaatcctatttatcttgtccatataaaagatacattccattagacggtaaaagatctaacttggttcaaactgcttggggtatgatgggcttaatcgccgctggtcaagctgatgttgatccaggtccaatacacagagcagccaagttattaatcaactcccaaactgaagatggtgacttccctcaagaagagattactggtgaattttttaagaactgcacattgcatttcgctgctttcagagaagtcttccctgtcatggctttgggtgaatactgtaataaggttccattgccatctaaaaaaaataccatcaattaa

SEQ ID NO: 202 - DNA, 2280 bp, Artificial Sequence
  Synthetic
atgtggcgtttaaaggttgcagatggtggcaatgacccttatatctactccatgtctaaccacttgggtagacaggtctgggaattttgtgctgacgctggttcaccagatgagagagccgaagttgaaagagtcagaaacgaatttactaaaaacagattgaagggtttcccatctgctgatttattgtggagattgcaattgttacgtgaaaaaaatttcaagcaatccattccaccagttaaggtcgaagacggtgaggaaataacatacgaaatggcctcagatgctatgaagagaggtgcttatttcttggaagcaattcaagcttctgatggtaactgggcctctgacttgggtggtcctatgttcttgttgccaggtttggttatcgctttatacgttaccggtgtcttgaactccgctttttctccagaacataagaaagaaatgatgagatacttatataatcaccaaaacgaggacggtggttggggtttgcatgttggtggtcactctaacatgttctgcactacctttaattacatttccttaagattgttgggtgaagaaccagatgtcgaagccgttgctaagggtagaatttggatccgtgatcatggtggtgttacttcaatcttgtcttggggcaaaacatggttgtctatattaaacttgttcgactggtccgcctcaaacccaatgccacctgaatattggatgttccctacctgggtcccaattcacccatctaatatgatgtgttacaccagaatcacttacatgccaatgtcctacttatatggcaagcgttttcaagctccattgactcctttagttttgcaattaagagacgaattacacacccaggcctacgagaagattaattggagaaaggttagacatatgtgtgctactgaggatttgtatttccctcacccattcgttcaagacttgttgtgggatacattgtacatgttatctgaaccattgatgactagatggccatttaacaaattgatcagacaaaaggctttggacgaaaccatgagacacattcattacgaagatgaaaactctcgttatatttgtttgggtccagtcgaaaaaccattgtgcatgttggcatgttgggtcgaggatccaaattccgaatacgtcaagaagcatttcgctcgtataccagactacttatggatggccgaagacggtatgagaatgcaaggttacaacggttctcagttgtgggatacagctttctcccaagcattattggcttgtaacataactcacgatatcggttcagctttgaataatggtcacgaatttattaaaaattcacaagttagaaacaaccctccaggtgatccaaacgtttggttcagacatatccacaaaggtgcttggccattctctactagagatcacggttggttgatctctgactgtaccgccgaaggcttaaaggcctccttgatgttgtccaagttgccttctaagattgttggtgagccattagaaaagtacgacgccgttaacgttttgttatcattacaaaatgaaaacggtggttttgcttcctatgaattgactcgttcctacccatggttggagttaatcaacccagctgaaacattcggtgatatcgtcattgactaccaacatgtcgaatgcacctcctctgctttgcaggcaatattattatttagaaagcaatatcctgaacacagaaagaaagagatcaataactttattaataaggccgttcaatttttacaagacattcaattgcctgatggttcttggtacggtaactggggtatttgttacacttatgctggttggttcggtattaagggtttggtcgctgctggtagaacctacaacaactgtgaagcattgagaaaaggtgccaatttcttgattaagatacaaaacccagaaggtggttttggtgaatcttatttgtcttgtccatataagagatacatccctttagacggtaagagatcaaacttggtccaaaccgcttggggtatgatgggtttgattgctgctggtcaagcagatgttgatccaggtcctatacatagagctgctaaattattaatcaattctcaaactgaagacggtgatttcccacaagaagaaatcatgggtgtcttcaacaagaactgcatgattacctacgcagctttcagagaagtttttccagttatggctttgggcgagtattgtaataaagttccattgccatctaagaagaacactattaattaa

SEQ ID NO: 203 - DNA, 2358 bp, Artificial Sequence
  Synthetic
atgtggcgtttaaaagtcggtaaggaatccgttggcgagaaggaagaaaagtggattaaatcaatatctaaccatttgggtagacaagtttgggaattttgtgcagagaatgacgatgatgacgacgatgaagctgtcatccacgttgtcgctaactcttccaagcacttgttacagcaacaaagaagacaatcttctttcgaaaatgccagaaaacaattcagaaacaatcgttttcatagaaagcaatcctctgatttgttcttgaccattcagtacgaaaaggaaatcgccagaaacggtgctaagaacggtggtaacactaaggttaaagaaggtgaagacgttaagaaggaggctgtcaataacacattggaaagagctttatcattctattcagcaattcaaacttctgatggtaattgggcttccgacttgggtggtcctatgtttttattgccaggtttggtcatcgccttatacgttaccggtgttttgaactctgtcttgtccaagcaccacagacaagaaatgtgccgttatatttacaatcatcaaaacgaggacggtggttggggtttacatatcgaaggttcatccaccatgttcggttctgctttgaactatgttgcattgagattattgggtgaagatgctaatggtggtgaatgtggtgccatgactaaggctagatcttggatcttggaaagaggcggtgccacagctattacttcatggggtaaattgtggttgtctgttttgggtgtctacgaatggtctggtaataacccattaccacctgaattttggttgttaccatactccttgccattccacccaggtcgtatgtggtgtcattgcagaatggtttacttgccaatgtcttatttgtacggtaaaagattcgttggtcctataacccacatggtcttgtctttaagaaaagaattgtacactataccataccatgaaattgactggaaccgttccagaaacacttgtgctcaggaggatttgtattacccacacccaaagatgcaagatatcttgtggggttccatttaccacgtctatgagcctttgtttaatggctggccaggtagaagattacgtgaaaaggccatgaagattgctatggaacacatccattacgaagacgagaactcaagatacatttgtttaggtcctgttaacaaggttttaaacatgttgtgttgttgggttgaagatccatactctgatgctttcaagtttcacttacaaagaatcccagattatttgtggttggctgaagatggtatgagaatgcaaggttacaatggttcccaattgtgggacactgctttttctatccaagcaattttatctaccaaattgatcgatacattcggttccaccttgagaaaagcccaccatttcgtcaagcactcacaaatccaagaagactgtccaggtgatccaaatgtttggtttagacatattcataagggtgcttggccattctccaccagagaccacggttggttaatatctgactgtaccgctgaaggtttaaaggcctctttgatgttgtctaagttgccatctaaaatagttggtgaaccattggagaagaacagattgtgcgacgcagttaacgtcttgttgtccttgcaaaatgaaaatggtggtttcgcttcctatgaattaactagatcttatccatggttggaattaattaacccagccgaaacttttggtgatatcgttattgactactcttacgtcgaatgtacatcagctactatggaggctttagctttatttaagaaattgcacccaggtcatagaaccaaagagattgacgctgccttggctaaggctgctaacttcttagaaaacatgcaaagaaccgatggttcttggtacggttgctggggtgtctgtttcacttatgctggttggtttggtattaagggtttggtcgccgctggtcgtacttataataattgtgttgcaattcgtaaagcatgtcacttcttgttgtctaaggaattgcctggtggtggttggggtgaatcctacttatcctgtcaaaacaaggtttatacaaacttggaaggtaatagacctcacttagttaataccgcctgggtcttgatggcattgatcgaagctggtcagggtgagcgtgatcctgccccattacatagagctgccagattgttgattaactcccaattggaaaacggtgattttccacagcaagaaattatgggcgtcttcaacaaaaactgtatgataacatacgccgcttacagaaacatatttccaatctgggctttaggtgaatattcacacagagtcttgactgaataa

SEQ ID NO: 204 - DNA, 2277 bp, Artificial Sequence
  Synthetic
atgtggaggttgaaggtagctgatggcggaaatgacccctacatagactcaacaaacaactttgtgggtcgtcaaatctgggagttcgatcctgattatggtactccggacgaacgcgccgaagtcgaagctgcaagagaaaacttctggaaaaatagatttcaggttaagttatctagtgaccttctatggagaatgcaattcgctagagaaaacccatgcgttaccaatttgccacaaattaaggtccaagatttggaggaagtgacggaagaagtcgtaaccactactctgaggagaggtttgaacttctactccaccattcaagcgcatgacggtcactggcctggtgattgtggtgggccaatgtttctattaccaggtttggttatcactttgtatgttactggtgccttacacgtcgttctttcgatcgagcaacagagagaaatgtgtagatacttgtgtaaccatcaaaacgaagatggtggttggggattgcacattgaaggcccatctaccatgtttggtacagttttgaattacgttaccctcagattattgggagaagctgacttcggtgctaaaggtgccatggaaaagggtcaaaagtggattctggatcatggcggtgctactgctattacgagctggggtaagatgtggttgtctgtcttaggtgcatatgaatggttcgggaccaacccattgcctccagaaatgtggttatgtccatacatccttccagttcacccgggtagaatgtggtgccattgtcgtatggtgtatttgcccatgtcctacttatacggtaaaaagttcgtcggcccaataaccagcactattatctcgcttcgtaaggaattgtacatcgttccatatcacgaagttgactggaatcaagctagaaatcagtgtgccaaagaggacttatattacccacacccattggtccaagatattttgtgggctagtttacataaggttttggagcctattcttggtcactggccaggtaacaatctaagagaaaaggccttatgtactgtgatgcaacacgttcattacgaagacgaaaacactagatacatttgcttgggccctgtcaacaaagtactaaacatgttgtgttgttggatcgaagatccaaactccgaagcttttaagttgcacataccaagaatcttcgattacctgtggatagctgaagatggtatgaaaatgcaaggttactctggttcacaattatgggacacgtcctttgctgttcaagctatcatttctactaatctaggtgaagaatatggtttgaccttgcgcaaggcacacgaatttattaagaactctcaggtcctggaggattgccctggtgacttgaagttctggtacagacacatctctaaaggggcatggccattctccacagccgaccaaggttggcctatctctgactgtacggctgagggcttgaaagccgtattattgctgagtaagcttccagttgaaaccgtcggggaaccattggatatgaagcatttgtcagatgctgttaatgtcattctatccttgcaaaatgcggatggtggtttcgctacttacgagcttactagatcttatcgttgggttgaactcattaaccctgccgaaacattcggcgacatagttatcgattacccatacgtggaatgtacctcggctgctatacaagccctcacttctttcaagaagctatatccggaacatagaagacatgaaattgaaaactgcatttctaaagctgcgaaatttattgaagaaatccaggctccagacggatcttggtatggttgttggggtgtctgttttacctatggtggttggttcggtatcaccggtttgattgctgccggtaatacatactccaattgtccatgtatcagaaaggcgtgtgattacttgttgagcaaggaattagcctcaggtggttggggtgaatcatacttatcctgtcaaaacaaggtctacacaaacctccctggagataagccacatatagttaacactgcttgggctatgctagctttgattgaagcaggacaagctggtcgtgacccgaatccattacacagagcagctcgaatcttgatcaatagtcaaatgaagaacggcgattttccccaagaagaaatcatgggagtgtttaacaaaaactgcatgattaactactctgcctatcgaaatatatttccaatctgggctctaggtgagcacagaagtagggtcttgcattcgtcctaa

SEQ ID NO: 205 - DNA, 2361 bp, Artificial Sequence
  Synthetic
atgggtaatatcaaggaacgtaaaggaaaggatagagagagacaaagagaaatgtggaagttaaaaataggtggtgaatccgtcggtaagaacaacgaagaaaaatggttgaagtcaatttctaatcacttgggtagacaggtttgggaattttgcccaaagttagaaaccgagactgaaacagagactgaatctcaaattgaaaacgcccgtaacaccttccatttgaacagattccacaaaaagcaatcctctgacttgtttatcactttgcaatatggtaatgaaattgctaaaatcgaaggtgttaagattaaggaaaaggaagaagtcagagaggaagctgttaaaactacattggagagagcattaaatttctactccgccatccaaacctcagacggtcattgggcttctgatttgggtggtcctatgttcttgttaccaggtttggttattactttgtacgtcaccggtgttttaaactccgtcttgtctaagcaccatagacaggaaatatgtagatatttgtacaaccaccaaaatgaagatggtggttggggtttacatatcgaaggtccatctactatgtttggttctgttttgaactacgtcgctttacgtttgttggctcaagactccgagtacgattccattttgaaaggtagaagatggatcttggaccacggtggtgcaacaggtattacctcatggggtaagttatggttgtccgttttaggtgtttatgaatggtgtggtaacaatccattgccacctgaattttggatcttgccatacttcttgccattccaccctggaagaatgtggtgtcactgccgtatggtttatttgccaatgtcttacttgtacggtaagagattcgtcggtccaattacccctactgtcttatctttgagaaaggaattatatacagtcccatatcatgaaattgactggaacaaatcccgtaatacttgtgctaaggaggatttatactacccacatcctaaaatacaagacatcttgtgggcttctttacatcacgtttacgaaccattctttaccagatggccaggtaagagattgagagataaggccttgcacgccgctatgcaacacatccattatgaagatgaaaatactagatatatttgtttgggtccagttaacaaagttttgaacatgttgtgttgttgggtcgaagaccctcactcagacgcttttaagtttcatttgcaacgtgtttacgattacttatgggttgctgaagatggtatgaagatgcaaggttacaatggttcacaattgtgggatactgctttctctgtccaagcaatcatctctaccaagttgactgaaaacttcggtccaacattaagaaaggcccataatttcattaagttgtcccagattcaacaagactgtccaggtgatccaaacatttggtatagacacatccataagggtgcttggcctttctctactgctgatcacggttggttaatttctgattgcaccgccgagggtttaaaggcatctttattattgtccaaagtctcttccaacacagttggtgaaccattggaacgtaacagattatttgacgctgtcaacgttttgttgtctttgcaaaacaagaatggtggtatagcctcatacgagttgactagatcttatccatggttagaattgatcaatcctgctgaaacctttggtgacattgttatcgactacccatatgttgaatgcacttctgctaccattgaagcattggctttgttcaaaaagttgtacccaggtcacagaaccaaggaaattgacaacgtcatagctaaggccgctaaattcttagaagatatgcaaagagaagatggttcttggtacggttgttggggagtttgttttacatacgcaggttggttcggtatcaagggtttggttgctgctggtagacaatataataattccccaaccattcgtaaggcatgtaacttcatattgtccaaagagttgccaggtggtgttggtggttggggtgagtcatacttgtcatgccagaacaaagtctacaccaatttggatggtaacagaccacatttggttaacacatcctgggctttgatggctttgatcgaagctggtcaggccgaccgtgacccaacccctttacatagagctgccagattgttgatcaactcccaattggaaaacggtgactttccacaacaagaaattatgggtgtcttcaacaagaattgtatgatcacttacgccgcttacagaaacatttttccaatctgggccttaggtgaatactgtcacagagtcttgaaccagcacagatcttctccattgttttaa

SEQ ID NO: 206 - DNA, 2310 bp, Artificial Sequence
  Synthetic
atgtggaagctaaaaattggtggcgaatctgttggtaagaacaatgaggaaaaatggcttaagtcgataagcaaccatctgggtcgacaggtgtgggaattttgtcctaagttagaaacagaaaccgaaactgagacggaatcccaaatcgaaaatgcccgtaacaccttccacctcaacagattccacaagaaacaatcatccgacttgttcatcacattgcaatacggaaatgagattgctaagattgaaggtgtcaaaatcaaggaaaaggaagaagtaagggaagaagcagttaagactactttggaaagagctttaaacttttatagtgctatacaaacttctgatggtcattgggcctctgatttagggggtcccatgttcttgttgccaggtttggtcattaccctgtacgttaccggtgttttaaatagtgtcttgtctaaacaccacagacaagaaatctgccgctacttgtataaccatcaaaatgaggacggcggttggggtttgcacattgaaggtccatccactatgtttgggtctgttctcaactacgtggctcttagattgttagctcaggactccgaatatgattcgattctaaagggtcggagatggatccttgatcacggtggtgcaacaggcatcacttcttggggaaagttatggttgtcagttttgggtgtctacgaatggtgtgggaacaacccactacctccagaattttggatcttaccatatttcttgcccttccatccaggtcggatgtggtgtcattgccgtatggtttacctgccaatgtcctacttgtacggtaaaagattcgtaggtccaattactcctaccgtcctatctttgagaaaggaactctatacggtgccataccacgagattgactggaataagtcaagaaacacctgtgccaaagaggacctgtactatccacacccgaagattcaagatattttgtgggcttccctgcatcatgtttacgaaccattttttaccagatggcctggtaaaagattgcgtgacaaggctcttcacgccgctatgcaacatatccactacgaagatgagaatactagatatatatgtttgggtccagtcaacaaagttctaaacatgttgtgttgttgggttgaagatccccattcggatgcgttcaagttccacttacaaagagtctacgactatctgtgggtcgctgaagacggtatgaagatgcaaggttataatggaagccaattgtgggacaccgcatttagtgtacaggctataatttctaccaagctcactgaaaattttggcccgactttaagaaaggcgcacaacttcatcaagttgtcacaaattcaacaagattgtccaggtgatccaaatatttggtacagacatatccacaagggtgcctggccgttctctaccgctgatcacggttggcttatctccgattgcacggctgaaggtttgaaagcttctctattgttgtctaaagtttcgtctaacacagttggggaacctttagagagaaaccgcttatttgacgctgtcaatgttttgttgtccttgcaaaacaagaacggtggaatagcttcctacgaattgactagaagctacccatggcttgaattgatcaatccagccgaaacattcggtgacattgtcattgattacccatacgttgaatgtacctcagctactatagaagctttggcccttttcaagaagttgtatcctggtcaccgaactaaggagattgacaatgtcatcgcgaaggccgctaaattcttggaagatatgcaaagagaagacggttcatggtacggatgctggggtgtgtgttttacgtatgcaggttggtttggtattaagggtttagttgctgccggtagacagtataacaactctccaactataagaaaggcttgtaatttcatcttaagtaaagagttgccaggtggtgtcggcggttggggtgaatcttatctgtcttgtcaaaacaaggtatacaccaacctagacggtaaccgtccacatttagtcaacaccagttgggctttgatggccctaattgaagctgggcaggctgaccgagaccccactccactccacagagcggcaagactgttgatcaatagtcaattagaaaatggtgatttcccacaacaagagattatgggtgttttcaacaagaactgcatgattacttacgctgcttacagaaatatcttccccatttgggcgcttggcgaatactgtcatagagttttaaaccaacaccgctcctctccactcttctaa

SEQ ID NO: 207 - DNA, 2280 bp, Artificial Sequence
  Synthetic
atgtggcgtttaaaggttggtgccgaatctgtcggagagaacgatgaaaaatggttgaagtcaatttccaatcatttgggtagacaagtttgggaattttgccctgacgctggtactcagcaacaattgttacaagtccacaaggctagaaaagcattccacgatgacagattccatagaaagcaatcctctgacttgtttatcaccatacaatacggtaaagaagttgaaaacggtggtaagacagctggtgtcaagttgaaagaaggtgaagaggttcgtaaggaagccgttgagtcttctttagaaagagcattgtccttctattcctcaatccaaacttcagatggtaactgggcttctgatttgggtggtccaatgttcttgttgccaggtttggttattgctttatacgtcactggtgtcttaaattccgttttgtctaaacaccatagacaagagatgtgtagatatgtttacaaccaccaaaatgaagacggtggttggggtttgcacattgaaggtccatctaccatgtttggttcagccttaaactacgttgctttgagattgttgggtgaagatgctaacgctggtgcaatgccaaaggctcgtgcctggatcttggaccatggaggtgctactggtataacctcttggggtaagttatggttatccgtcttgggtgtctatgaatggtctggtaataaccctttgccaccagaattttggttattcccatacttcttaccattccacccaggtagaatgtggtgtcattgtagaatggtctatttgcctatgtcttacttgtacggtaagagatttgttggtccaatcacacctattgttttatctttgagaaaggaattatacgccgtcccatatcacgaaattgattggaataaatcaagaaacacctgtgctaaggaggacttgtactaccctcatccaaaaatgcaggatattttgtggggttccttgcaccatgtttatgaaccattattcactcgttggcctgctaagagattgcgtgaaaaggccttgcaaactgctatgcaacacatccactacgaagatgaaaacactagatacatctgtttgggtccagtcaataaggtcttgaacttgttatgctgttgggttgaagacccatactccgacgcttttaaattacacttgcaaagagttcatgattacttatgggttgctgaggatggtatgaagatgcagggttataacggttctcaattgtgggacaccgcattttcaatacaggctattgtctctactaagttagtcgataattatggtccaaccttgagaaaggctcatgacttcgttaagtcctcccaaatccaacaagattgtccaggtgacccaaacgtctggtacagacacattcataaaggtgcttggcctttctctactcgtgatcatggttggttaatctccgattgcaccgctgaaggtttgaaggcagccttgatgttgtccaagttaccatctgaaactgttggtgaatctttggaaagaaacagattgtgtgacgccgttaatgttttgttgtccttacaaaacgataatggtggatttgcctcttacgaattaacaagatcatacccatggttggagttgattaacccagctgaaacattcggtgatatcgtcattgattatccatacgtcgaatgcacctctgctaccatggaagctttgactttgtttaaaaagttgcacccaggtcatagaaccaaggaaattgacactgctattgttagagcagctaacttcttggaaaacatgcaacgtactgacggttcttggtacggttgttggggtgtttgttttacatacgccggttggttcggtatcaagggtttggttgccgcaggtagaacctacaacaattgtttggctataagaaaagcttgtgacttcttgttatccaaggaattgccaggtggtggttggggtgaatcatacttgtcctgtcaaaataaggtttatactaatttggaaggtaacagacctcacttggttaataccgcctgggtcttaatggctttgatagaagctggtcaagctgaaagagacccaactcctttacaccgtgctgcaagattgttgatcaactcacagttagaaaatggtgattttcctcaacaagagataatgggtgttttcaacaagaattgcatgattacctatgccgcttatcgtaacatcttcccaatttgggcattaggtgagtactgtcatcgtgttttaacagagtaa

SEQ ID NO: 208 - DNA, 2298 bp, Artificial Sequence
  Synthetic
atgtggagattaaaagttggtgctgatacagtcccagccgacccttccaatgctggaggttggttgtcaactttgtctaaccacttgggtcgtcaagtttgggaattttgcgcagagttaggttctccagaagatttgcagcaaatccaacatgctagacaaagattctctgaccacagattcgaaaagaagcattccgccgatttgttaatgagaatgcaatttgctaaggaaaactcttcattcgtcaacttgccacagattaaagttaaggacaaagaagatgttatagaggaagctgttacccgtactttgagaagagcaattaatttttactccaccatccaagctgatgacggtaactgggcctctgatttgggtggtccaatgttcttattgccaggtttggtcattgctttatatgttactggtgtcttgaactctgttttgtccactgaacaccaacgtgaaatatgtagatacttatataatcatcagaacagagacggaggttggggtttgcacatcgagggtccttctaccatgttcggttcagtcttgaattacgttactttgagattattaggtgaagaagctgaagatggtcaaggtggtgttgacaaggccagaaagtggattttggatcacggtggtgctacagctattacctcctggggtaaaatgtggttatctgtcttgggtatctacgaatgggccggtaataacccattaccacctgaattgtggttgttgccatatttgttgccatgtcatcctggtagaatgtggtgtcactgtcgtatggtttacttaccaatgtgctacttgtatggtaaaagatttgtcggtccaattaccccaatcataagatcattaagaaaggagttgtacttggtcccatatcacgaagttgactggaacgaagccagaaatcaatgtgctaaggaagacttgtactacccacatccattagttcaagatgtcttatgggcttccttgcaccatgtttatgagccattgttcatgagatggcctgctaagagattgagagaaaaggctttgagatccgttatgcagcatatccactacgaagatgaaaactctcgttatatttgtttgggtccagtcaataaggtcttaaacatgttgtgttgctgggccgaagatcctcactctgaagcattcaagttgcatatcccaagaatctacgactacttgtggattgcagaagacggtatgcgtatgcaaggttataatggttcacaattgtgggacactgcattctctgttcaagctataatttctaccaagttggctgaagagtacggtactaccttaagaaaagctcacaaatatatcaaggattctcaagttttggaagattgtcctggtgacccaaacgtttggtttagacacattcataagggtgcttggccattttccacacgtgatcacggttggttgatctctgattgtactgccgaaggtttgaaggcctcattaatgttatctaagttgccatccaaaattgtcggtgaaccattagagaaggaaagaatatacgatgctgttaacgtcttgttatccttgcagaacgaaaacggtggtttcgcttcctacgaattaactagatcatatccatggttggaattaattaatccagccgaaacttttggtgacattgttattgactacccatatgtcgaatgtacctccgctgctatccaagccttggctgccttcaagaaattgtacccaggacacagatctaatgagataggtaactgtatcgctaaggccgcagatttcatcgaatctatccaagctactgatggttcttggtacggttcttggggtgtttgtttcacatacgctggttggtttggtattaagggtttggttgctgccggtagaacctataataactgttcatctttaagaaaagcatgcgacttcttattatcaaaggaattggccgctggtggttggggtgaatcctacttgtcttgccaagacaaagtctacactaatatcaaggatgaccgtcctcacattgttaacaccggttgggctactttgtccttgattgacgctggtcaagctgaaagagatccaacccctttgcaccgtgccgctagagttttaattaactctcaaatggacgatggtgactttccacaagaagagattatgggtgtcttcaacaagaattgcatgatcacttatgccgcttatagaaacatatttccaatatgggctttgggtgagtacagatgtcgtgttttacaagcaccataa

SEQ ID NO: 209 - DNA, 2277 bp, Artificial Sequence
  Synthetic
atgtggcgcttaaagattgcagagggtggaaacccgtggctgagaactaccaatgatcatgtcgggcgtcaagtttgggaatttgaccctgaattgggttcaccagaagaattgtctgctatagaattggctcggagagatttcacgaaaaacagattcgaacacaagcacagcgccgacctattaatgaggatccagttttccaaggagaatccattggaaagagtgcttccccaagtaaaattgaaggaaaaagaagatgttacaaaggaagctgttaagagtaccctagaaagagcgctttctttctactccgctgtccaaacttcggacggcaactgggcctctgacttaggtggtccaatgttcctcttgccaggtttggtcattgcactatctgttactggtgctatgaacgctgttctttccgaacaacataagtccgagatgagaagatatttatacaatcaccaaaacgaggatggtgggtggggcttgcatatcgaaggtcctagtacaatgtttggttcagtattgtcttatgtcaccctgagattgttgggtgaaggtgctaatgatggtgaaggtgccatggaaaaaggtagagattggattgtcaatcacggtggagccaccgctatcacttcttggggtaagatgtggttaagcgttttgggtgtctttgaatggagtgggaacaacccattgccaccagagatttggttgctgccttacatgttaccaatccatccgggtcgtatgtggtgccactgtagaatggtttacttgcctatgtcttatctatacggcaaaagattcgtcggtccaataactccaactgttttgtctttacgaaaggaattgttctccacgccctatcacgaaattgactggaatagagcgagaaacgaatgtgcaaaggaggacttatactacccacatccattgattcaagacttgctttggggttctctacacaactttgtggaacctatcctcatggcttggcctggaaagaagctaagagaaaaagcattgcgcaccaccctggaacacatccactatgaagatgaaaatactcgttacatttgtttgggtccagtgaacaaggttttgaacttgttgtgctgttgggtagaagacccatacagcgatgctttcaaattgcatttacaaagagtccacgattatttgtgggttgctgaggatggcatgaagatgcagggttacaacggttcgcaattgtgggacactgccttctccatccaagctatcctgtctacaaacttaattgaagaatacgcttcgacccttaaaaaggctcatgcctttgttaaagactcacagatacaagaagattgtccaggtgatccaaacgtttggttcagacatattcacaagggtgcttggccattctccaccagagaccacggttggcttatctctgattgtactgccgagggtcttaaggcttcgttgatgttatctaagctgccctcaacgatggtgggcgaaccactagaagctaataggttgtgtgacgccgtcaatgttcttctgtcattacaaaatgacaacggtggttttgcttcctacgaattgactcgttcctacccatggctcgaacttataaatcctgctgaaacattcggtgacattgttattgattacccatatgttgaatgcacatccgctaccatggaagcactgactctcttcaagaagttacaccccggtcatagaactaaagagattgacacctgtatcaagaaagccgtcgcgtttttggaaaaaatgcaaagagcggatggttcatggtatggttgttggggtgtttgttttacttacgctggttggtttggaatcaaggggttggttgctgctgggcggacctacaactcttgtttggccataagaaaggcttgcgagttcctcttgtcaaaggaattaccaggtggtggttggggtgaatcttatttgtcttgtcaaaataaagtctacactaacttggaaggtaacaagccacatttggtaaacaccgcctgggtcttgatggctttgattgaagccggacaagccgaaagagatccagctccactgcacagagctgctaggtttttaattaactctcaaatggaaaatggtgacttccctcagcaagagatcatgggggtgtttaacaggaattgcatgatcacgtattcggcttatagagatatcttccctatttgggccttgggtgaataccgcacgaaggttttgcatgccagcagctaa

SEQ ID NO: 210 - DNA, 2280 bp, Artificial Sequence
  Synthetic
atgtggcgtttaaaaatctcggagggaggcaatccttggttgaggacgacaaacaaccacgtcggtagacaggtgtgggaatttgacccagaactaggtagtccagaagaactctctgccattgaattggcacgaagagatttcaccaagaatagattcgaacaaaagcattcagcggaccttctgatgagaatacaattttctaaggagaaccccttggaaagagttttgccacaagtaaaattgagagaaaaggaagatgttactaaggaagctgtcaaaagcaccttagagagagctttgtccttctactctgctgttcaaacttccgatggtaattgggctagcgacttaggtggtccaatgtttctactgccaggtctagttatcgccttgtctgtcaccggtgctatgaacgctgttttatcagaacaacacaagtctgaaatgtgccgctatctttacaaccatcaaaacgaagatgggggttggggcttgcacattgaaggtccttccactatgttcggttcggttttgtcttatgtcactcttagattgttgggtgaaggaccgaacgacggtgaaggtgctatggggaagggacgggattggattttaaatcatggtggggctacagcaatcacctcctggggtaaattgtggttgagcgtcttgggtgtgttcgagtggtctggaaataacccactcccacccgaaatctggttattaccttacatgctaccaattcacccaggtaggatgtggtgtcactgtagaatggtttacctgccaatgtcctatttgtacggtaagagatttgttggtccgataactccaacagttttgtctttgagaaaggaattgttctccactccatatcacgagatcgattggaatagagcgcgtaacgaatgtgccaaggaagacttatactacccacatcctttaattcaggacttattgtggggttcattgcacaacttcgtagagccaattttgatggcatggccgggtaaaaaattgagagaaaaggctctgcggaccaccctagaacatattcattacgaagacgaaaacacaagatatatatgcctgggtccagtcaataaggtcttgaaccttttgtgttgttgggttgaagatccttacagtgacgcctttaagttacacttacaacgtgtacacgattacttgtgggtcgctgaagacggtatgaagatgcaaggctacaatggttctcaactctgggatactgctttctccatccaagctattttgtcaactaacctcgtagaagaatacgcctccacattgaaaaaggctcacacctatgttaaagacagccaaatccaggaagattgtccaggcgatcctaatgtttggtttagacatatacataagggtgcctggccattctctactagagaccatggttggttgatttcagattgtacagcagaaggcttaaaggcttcactaatgctttctaagttgccatctactatggtcggggaaccattggaagctaaccggctctgcgacgctgttaatgtcttgctatcgttacaaaacgacaacggtggtttcgctagctatgagttgaccagatcttacccatggttggaactgatcaatcctgcggagacatttggcgatatagttattgactacccgtatgtcgaatgtaccagtgccactatggaagctcttactttatttaaaaagttgcaccctggtcaccgtacgaaggaaatcgatacctgcattaaaaaagctgtcgccttccttgaaaagatgcaaagagctgatggttcttggtatggttgttggggtgtttgtttcacttacgcaggatggttcggtatcaagggtttagtcgcggctggtagaacgtataattcctgtttggctatcaggaaggcgtgcgaatttttgctaagtaaagaattgcccggtgggggctggggtgaatcttaccttagttgtcaaaacaaggtatacaccaacctagaaggtaacaagccacatcttgttaacactgcttgggtgttaatggctttgattgaggctgggcaagccgagagagatccggccccattgcacagagcagctagattcttgattaactcccagatggaaaacggtgattttccacaacaagacatcatgggtgtttttaatcgcaactgtatgataacctatgctgcttacagggacattttcccaatttgggctttgggtgaataccgtactaaggttttgcacgcaagcccttcctaa

SEQ ID NO: 211 - DNA, 2289 bp, Artificial Sequence
  Synthetic
atgtggagattaaaagttggtgcagagtccgtcggggaaaacgacgaaaagtgggttaagtctatatcaaatcatttgggtcgtcaggtctgggaattttgcccagatgctggtacccctcaacaattgttgcaaattgaaaaggccagaaaagctttccaagacaacagattccacagaaagcaaacttctgatttattggtttctatccagtgtgaaaaaggtactacaaacggtgctagagtcccaggtaccaagttgaaggagggtgaagaagttcgtaaggaagccgttaagtccactttggaaagagctttatccttttattcttcaatccaaacatctgacggtaattgggcttctgatttgggtggtccaatgttcttattgccaggtttggttattgccttatgtgtcaccggtgctttgaactccgtcttgtccaaacaccatagacaagagatgtgtagatacttgtacaatcaccaaaacgaagacggtggttggggtttacatattgaatccccatctactatgtttggttccgcattgaactacgttgctttgagattattgggtgaagatgccgatggtggtgaaggtcgtgctatgaccaaagctagagcctggatcttggggcacggtggtgctaccgccatcacttcttggggtaagttatggttatcagtcttgggtgtctatgaatggtctggtaataatcctttaccacctgaattttggttgttgccatacttcttgccattccaccctggtagaatgtggtgtcattgcagaatggtttatttaccaatgtcctacttgtacggtaagcgtttcgttggtccaataactccagtcgttttgtctttgagaaaggaattgtatactgttccttaccacgagattgactggaacaagtcaagaaacacctgtgctaaagaagatttatattacccacattctaagatgcaagatattttgtggggttctattcaccatatgtacgagccattgtttacccactggcctgctaaaagattgagagaaaaggctttgaagacagcaatgcagcacatccattacgaagacgaaaatactagatatatctgtttgggtccagttaacaaggtcttaaatatgttgtgttgctgggttgaagacccatattctgaagccttcaagttgcacttacaaagagtccacgattacttgtgggttgctgaagacggtatgaaaatgcaaggttacaacggttcacaattgtgggacaccgcattctccgttcaagctattatctctactaagttagtcgataactacggtccaactttgcgtaaggctcatgactatgtcaaaaactctcaaatccaacaagattgtccaggtgaaccaaacgtctggttcagacacattcacaagggtgcttggccattctccaccagagatcacggttggttgatttctgattgcacagctgaaggtttaaaagcatctttgatgttatccaagttgccttccgagacagttggggaacctttagaaagaaatcgtttatgtgatgccgttaatgttttgttgtccttgcagaacgacaatggtggttttgcatcatatgaattgactagatcttacccttggttggagttgattaacccagctgagacttttggtgacatcgttattgattacccatatgttgaatgtacttctgccaccatggaagctttagctttgttcaagaaattgcatccaggtcaccgtaccaaagaaatcgacacagcaatcgctcgtgctgctgattttttggagaacatgcaaagaactgacgggtcttggtacggttgttggggtgtctgtttcacttacgctggttggttcggtattaagggtttggtcgctgccggtagagcatattccaactgtttggctattagaaaagcctgtgatttcttattgtcaaaggaattgccaggtggtggttggggtgaatcttacttgtcctgtcagaacaaggtttatactaacttagaaggtaatagaccacacttggttaataccgcctgggttttaatggctttgatagaggctggtcaaggtgaaagagatcctgccccattgcacagagcagctcgtttattgatcaactctcaattggaaaacggtgattttccacaagaagaaatcatgggtgtctttaataagaactgcatgattacctacgctgcatatagaaacatattcccaatctgggctttgggtgagtactgtcatagagttttaactgaataa

SEQ ID NO: 212 - DNA, 2112 bp, Artificial Sequence
  Synthetic
atgggttctaataacttcgtcggccgtaagatgtggagattaaaattgggtgaaggtgcaaacaatccttatttgtggtcatccaacaactttgttggtagacagacttgggacttcgaggccgatgaaggtacaccagaagaaagagctcaaatagaagctgctagaaagacctactttcaaaacagattcaaagttcaatgttctaatgatttattctggaagtttcaagttttcgccttctacattactggtcatttgggtaccatctttccagaggaacaccaaaaggaattgttacgttatgcttactgccaccagaacgaagacggtggttggggtttgtacattatgggtgagtcctgtatgttatgtactgtcttgaattatatccaattgagattgttgggtgaagaaccagataccgacgcttgtaacagagcccgtaagtggattttggatcatggtggtgctttatacattccttcttggggtaagatctggttgtccatattgggtgtttacgaatgggacggtgctaacccaatgccaccagaattttggttattcggtaatgctttaccattgaaaccaggtcacttgttgggttactctcgtttgactttattgccaatgtcctatttatatggcaagagatttgtcggtacattaactcctttgattttgcaattgagacaagagatctacacccaaccatactctaatatcaaatggtcacctgccagacactactgtgctaaggaagataagtgcttcgaaagatcatggattcaaaagttggcatgggacgctgttcattacttaggtgaaccattgttgggctcttgggcattcaaatctgttagaaacagagctttgcaaattgccagatttcatatcgattatgaagaccaaaattcccactacatcacaatcggttgtgtcgaaaagccattgtgtactttggctacctgggtcgacgatccaaacggtcaggcctacaagaagcacttagctcgtgttaaggattacttgtggattggtgaagacggtatgaaaatccaatcattcggttctcaatcttgggatgttgctttcgctattcaagccattttggctaccaactttcatagagaattttctgatactttaaaaaagggtcatgatttcataaagaagtcccaaattagagagaatccttctggtgatttccaatccatgtatagacacatctcaaaaggttcctggtctttctctgaccaagatcacggttggcagttgtccgactgcactgctgaaaacttaacttgttgcttaatcttatctacaatgccaccagatatggtcggtgaccctatgaagccacaatgttttttcgatgcagttaatattatcttgtccttacaggccaagaacggtggtgtctccgcttgggaacctaccggtatcgtttcatcttggtttgaaagattgaatccagttgaatttttagaatattctattttggaattggaatacgtcgaatgtacttcttcctctttgcaagccttggttttgttcaaaaagttattcccaaaccacagaaaaaaagaaatcgagactttcataaccaagggtgtcaactatattaaggaaatgcaaaaagacgatggttcttggtacggtaactggggtatttgtcatttgtacgctacctacttcgcaattaaaggtttagttgctgttggttactcttacgactcctgttccacaataagaagaggtgtcgactttttgttaaagatccaatgtccagatggtggttggggtgaatcacatgtctcagtcaccaagaaggtttatactcctttgcaacacaacgcttccaacttggttcaaacttcattcgctttgatggctttgatccacgctcaacaagccaatagagatccaacaccagttcacagagcagctaagttgttgataaactctcaattagaagacggtgactaccctcaacaagaaattactggtgcatttatgggtaattgtatgttgcattatccattgtataaaaacgtcttcccattgtgggctttggccgattattgcaacttggttcctttgccataa

SEQ ID NO: 213 - DNA, 2271 bp, Artificial Sequence
  Synthetic
atgtggaaactaaaggtggcagagggtggcaccccatggttacggacattgaacaatcacgttggacgtcaagtctgggaatttgaccctcattctgggtccccacaggatttggatgacattgaaactgccagaagaaacttccacgataaccgattcacgcataagcacagtgacgatctgcttatgagattgcaatttgctaaggaaaatcccatgaacgaagttttacctaaagtaaaggttaaggatgtcgaagacgttactgaagaggctgtcgctaccactttgagaaggggtctcaacttctattcgaccatacaatctcacgacggtcattggccaggtgatttgggtggtccaatgtttcttatgccaggtttggttatcactttgtcagtaaccggtgctttaaatgccgtcttaacagatgaacatagaaaagaaatgagaagatacttgtacaatcatcaaaacaaggacggtggctggggtttgcacatcgagggtccgagcacaatgttcggatctgttctgtgttatgtcactttgagattgcttggtgaaggtccaaacgatggtgaaggggacatggaacgtggtagagactggattttagaacacggtggtgcgacttacatcacgagttggggtaagatgtggctaagcgttttgggcgtctttgagtggtccggtaacaatccaatgccaccagaaatttggctacttccttacgctctaccagttcacccaggtagaatgtggtgccactgtagaatggtatatttgcccatgtcctacttatacggcaaacgcttcgttggtcccattacccctacggtgttgtctttgaggaaggaattgttcactgttccatatcatgacattgattggaaccaagctcgcaatctttgtgcaaaagaagatttgtactatccacatccattggtccaggatatcctgtgggccaccttacataagtttgttgaaccagtcttcatgaactggccgggtaagaaattaagagagaaggctataaaaactgccattgaacacatccactacgaagacgaaaatacacgttatatatgtatcggacctgtcaacaaggttctcaacatgttgtgttgctgggttgaggatccaaattctgaagctttcaagttgcacttaccaagaatttacgactacttgtgggtggctgaagatggtatgaagatgcaaggttataacggttctcaattatgggacaccgcgtttgctgcccaagctataatcagtactaatttaattgatgaatttggaccgactcttaagaaggctcacgcattcattaagaactcacaagtgtccgaagattgtccaggtgacttgtctaagtggtacagacatatctcaaagggggcctggcccttttccaccgctgaccacggttggccgatctctgattgtaccgctgaaggtttgaaggctgttttgctactatccaagattgcgccggaaattgtcggtgaaccactggactctaaacgtttgtacgacgccgtgaatgttatcttgtccttacaaaacgaaaacggtggcctcgctacttatgagctaacgagatcctacacttggttggaaattattaatccagctgaaacattcggtgacattgttatagactgcccatatgtagagtgtacctctgctgctatccaggcactagccaccttcggcaaactatacccaggtcatcgaagagaagaaatacaatgttgcatcgaaaaagctgtcgcgttcattgaaaaaattcaagcttcagatggttcatggtacggttcttggggagtctgtttcacttacgcaacttggtttggtatcaaaggtttgatcgctgccggtaagaacttctcgaactgtttgtctataagaaaggcttgcgaatttttgttgtccaagcaattgcctagcggtggctgggccgaaagttatctttcctgtcaaaataaggtttattctaatttagaaggtaacagatcgcacgttgtgaacacaggttgggctatgttggcattgattgaagccgagcaagctaagagagatccaacgcctttgcaccgtgcggctgtttgtttaattaactctcaactcgagaacggcgatttccctcaggaagaaatcatgggtgtctttaacaaaaattgtatgattacttacgccgcttaccgttgtatttttccaatctgggctcttggtgaatacagaagagttctgcaagcctgctaa

SEQ ID NO: 214 - DNA, 2295 bp, Artificial Sequence
  Synthetic
atgtggcgtttgaaagtcggagccgagagtgttggcgaagaagatgaaaagtgggtgaagtccgtttctaaccacttaggtaggcaggtatgggaattttgtgctgacgcggcagccgacaccccacatcaactgttgcaaatccaaaatgctagaaaccacttccatcacaatagattccatagaaagcaatcgtctgatctttttttggctatacaatatgaaaaagaaattgctaagggtgctaagggtggtgccgttaaagtcaaggaaggtgaggaagtcgggaaagaagctgttaagagcacactagaaagagctttgggtttctactccgctgtacaaactagagatggtaactgggcatccgacctaggtggtcccttatttttgttacctgggttggttattgcgctccacgtcactggtgttttgaatagtgtcttgtctaagcatcaccgtgttgaaatgtgcagatacctatacaaccatcagaacgaggatggtggttggggtttgcacatcgaaggcacctctaccatgttcggttcagcccttaactatgtcgctttaagactgctcggagaagacgctgacggtggggatggtggtgccatgacgaaggctcgagcttggattttggaacgcggtggtgccactgctatcacatcttggggcaaattgtggttgtcagttttaggtgtttacgaatggagcggtaataatccattaccaccagaattttggttgctaccgtactcattgccattccaccctggtagaatgtggtgtcattgtagaatggtctatttgccaatgtcctacttgtacggaaagagattcgttggtccaataactcctaaagttctttctcttagacaagaattgtatacaattccataccacgaaattgactggaacaagtctcgcaatacctgcgccaaagaggatctgtattacccacatcctaagatgcaagacatcttgtggggttctatttaccatgtgtacgaaccattatttactcggtggccgggcaagaggttaagagagaaagcccttcaagctgcaatgaagcacatccactatgaagatgaaaactcgcgttacatatgtttgggtccagtcaacaaggtcttgaacatgctttgttgttgggttgaagatccatattccgacgcattcaaattgcatttgcagagagtgcacgactacttatgggttgctgaagatggcatgagaatgcaaggatacaatggttcgcaattgtgggacactgctttcagtatccaagctattgttgctaccaagttagtcgattcctacgctcctaccttaagaaaggcccacgatttcgttaaggattcccaaattcaggaagattgtcccggtgatccaaacgtgtggtttcgacacatccataaaggtgcatggccattgtctactagagaccatggttggttaatctctgactgtacggctgaaggtctcaaggcctccttgatgttgtctaaattaccttcgactatggtaggtgaaccactggaaaagaacaggttgtgcgacgctgttaacgttctattatcactccaaaatgacaacggcggtttcgcctcttatgagttgactagatcatacccatggttggaattgattaatccagctgagaccttcggtgacatcgttatcgactatccatacgtcgaatgcactgccgctacaatggaggctttgactttattcaagaaactgcaccctggtcatagaacgaaggaaattgatactgccattggtaaggctgctaattttctggaaaaaatgcaacgtgcagatggtagttggtatggctgttggggtgtctgtttcacctatgctggttggtttggtataaagggattagttgctgcgggtagaacctataattcttgtcttgcgatcagaaaagcttgtgagttcttgctatctaaggaattgcccggaggtggctggggtgaaagctacttgtcctgtcaaaacaaggtctacaccaacttggaaggtaacaagcctcacttggttaacactgcttgggtattaatggccttgattgaagctggacaaggggaaagggatccggcgccattacatagagctgcaagattgctaatgaacagccaattggaaaatggtgatttcgtacaacaggaaattatgggtgtattcaataagaattgcatgattacgtacgccgcctatcgtaacatctttccaatctgggcgctaggtgagtactgtcatcgagtgctaacggaataa

SEQ ID NO: 215 - DNA, 2295 bp, Artificial Sequence
  Synthetic
atgtggcgtttgaaggttggtgctgagtctgtcggagaaaaagacgaaaagtgggtcaaatccgtttcaaatcacttaggtagacaagtttgggaattttgcgccgatgctgatgcagttacccctcatcagtctttgcaaattcacaacgctagaaaccatttccaccaaaatagattcagaagaaagcaatcttccgacttgtttttagctatacaatatgaaaaggagatcgccaagggtgttaaggtcggtgctgttaaagtcaaagaaggtgaagaagttggtaaggaagcagtcaagtctacattggagcgtgctttgtcattctactccgctgtccagacttctgatggtaactgggcctctgacttaggtggtccaatgttcttgttgccaggtttagttattgccttgtacgttactggtgttttaaattccgtcttgtccaagcaccatagattggaaatgtgtagatatttatacaaccatcaaaacgaagatggtggttggggtttgcacatcgaaggttcttccaccatgtttggttcagctttgaactacgtcgctttaagattgttgggtgaagacgttgatggtggtgatggtggagctatgactaagggtagagcatggattttggaccgtggttctgccactgccatcacctcttggggtaaattatggttgtccgttttgggtgtctacgagtggtccggtaacaacccattacctccagaattttggttgttgccatattctttaccattccacccaggtagaatgtggtgtcactgtagaatggtttacttgccaatgtcatatttgtacggtaagagattcgttggtcctataacaccaattgtcttatctttgagaaaggaattgtacaccgttccttaccatgaaatcgactggaataagtccagaaatacttgtgctaaagaagacttgtattacccacacccaaaggtccaagatattttgtggggtactatccaccatgtttacgaaccattgttctctggttggccatgcaaacgtttgagagaaaaggctttgcaaactgccatgaaacacattcactacgaagatgagaactctaactatatctgtttaggtcctgttaacaaggttttgaatatgttatgttgctgggttgaagacccatattcagacgcttttaagttgcatttgcaaagaatccatgatttcttatgggtctctgaggatggtatgaagatgcaaggttacaacggttcacagttgtgggataccgctttttccattcaagccattgcttctacaaagttggttgacacatacggtcactcattaagaaaagcacacaatttcgtcaagaactctcaaatacaacaggattgtccaggtgattccaatgtctggtttagacacatacataaaggtgcttggccattctctacccgtgatcacggttggttaatctccgactgtactgctgaaggtttaaaagcttcattgaccttatctaagttgccatcccaattggttggtgaacctttggaaaagaacagattgtatgacgcagttaatgtcttgttgtcattacaaaacgaaaacggtggtttcgcttcctacgaattaactagatcttatccttggttggagttgattaacccagcagaaacttttggagatattgttatcgattattcttacgttgaatgcactgctgccaccatggaggctttggcattattcaagaagttacacccaggtcatcgtaccaaggaaatcgatacctgtattgctaaggccgccaacttcttggaaacaatgcaaagaactgacggttcttggtatggttgttggggtgtttgtttcacctacgctggttggtttggtatcaaaggtttgatcgctgctggtagaacatacaagacctgtattgctataagaaaggcctgcgattttttattgtctaaagaattgcctggtggtggttggggtgaatcttacttgtcatgtcaaaacaaggtctacactaatttggagggtaatcgtccacacttggtcaatactgcttgggtcttgatggccttgattgaagctggtcaagctaaaagagaccaggccccattgcatagagccgctcgtttattaattaattcacaattggaaaatggtgacttccctcaacaagaaataatgggtgtttttaacaagaattgtatgatcacttatgctgcttacagaaacatctttccaatttgggccttgggagagtattaccatagagttttgactaaataa

SEQ ID NO: 216 - DNA, 2280 bp, Artificial Sequence
  Synthetic
atgtggagattgaaagtaggtgctgaatccgtaggtgaaaacgacgaaaagtggttgaaaagtataagtaatcatttgggtagacaagtctgggaattttgtccagatgcaggtacacaacaacaattgttgcaagtacataaggctagaaaggcatttcatgatgacagattccacagaaagcaatcttcagatttgttcatcaccatccaatacggcaaggaagtagaaaacggtggcaagactgctggtgttaaattgaaggaaggtgaagaagttagaaaagaagcagttgaatccagtttggaaagagccttgtctttctactcttcaatccaaacctctgatggtaattgggcatcagacttgggtggtccaatgttcttgttacctggtttggtcattgccttgtacgtaactggtgttttgaactctgtattgtcaaagcatcacagacaagaaatgtgtagatacgtttacaaccatcaaaacgaagatggtggttggggtttgcacattgaaggtccatccactatgtttggtagtgcattgaattatgtcgccttaagattgttaggtgaagatgcaaacgccggtgctatgcctaaggcaagagcctggatattagaccatggtggtgctactggtatcacatcctggggtaaattgtggttaagtgtcttaggtgtatatgaatggtctggtaataacccattgccacctgaattttggttgttcccttactttttaccattccatcctggtagaatgtggtgtcactgcagaatggtttacttgccaatgtcttacttgtacggcaagagattcgttggtccaataacacctatcgtcttgtcattgagaaaggaattgtacgcagttccttaccatgaaatcgattggaacaagtccagaaacacctgtgctaaggaagatttgtattacccacaccctaaaatgcaagacattttgtggggtagtttacatcacgtttacgaaccattatttactagatggcctgctaaaagattgagagaaaaggcattacaaacagccatgcaacatatccactacgaagatgaaaacaccagatacatctgcttgggtccagttaacaaggtcttgaacttgttgtgttgctgggttgaagatccttattctgacgctttcaagttgcatttgcaaagagtacacgattacttgtgggttgcagaagacggtatgaaaatgcaaggttacaatggttcacaattgtgggatacagctttttccattcaagcaatagtcagtactaagttggtagataactacggtccaacattaagaaaagctcatgacttcgtaaagtccagtcaaatacaacaagattgtccaggtgaccctaatgtttggtatagacatatccacaaaggtgcatggccattttctaccagagatcatggttggttgatttcagactgtactgctgaaggtttgaaggctgcattgatgttgtctaagttgccatcagaaactgttggtgaatccttggaaagaaatagattatgcgatgccgttaacgtcttgttgagtttgcaaaacgacaacggtggtttcgcttcttacgaattgactagatcatacccatggttggaattaattaatcctgctgaaacattcggtgatatcgtcattgactatccatacgtagaatgtacctccgctactatggaagcattgaccttgttcaagaagttgcatcctggtcacagaacaaaggaaatcgataccgcaattgttagagccgctaatttcttggaaaacatgcaaagaacagacggttcttggtatggttgttggggtgtttgctttacctacgctggttggttcggtattaaaggtttagtcgcagccggtagaacatacaataactgtttggccataagaaaagcttgcgatttcttgttatctaaggaattaccaggtggtggttggggtgaatcctacttgagttgtcaaaacaaggtttacactaatttggaaggcaacagacctcatttagttaacacagcctgggtcttgatggctttaatcgaagccggtcaagctgaaagagatccaactcctttgcatagagctgcaagattgttgatcaactcacaattggaaaacggtgattttccacaacaagaaatcatgggtgttttcaacaagaactgcatgataacatatgccgcttacagaaacatttttcctatatgggctttgggtgaatactgccacagagtcttgaccgaataa

SEQ ID NO: 217 - DNA, 2280 bp, Artificial Sequence
  Synthetic
atgtggaggcttaaagtaggcgcggaatcagtcggggagaatgacgaaaagtggctgaaaagcattagtaaccacttgggtcgccaggtgtgggaattttgcccagatgcaggtacgcaacaacaactattacaggttcataaggctagaaaagccttccatgatgaccgttttcacagaaagcaatcgtccgatttattcatcaccatacaatatggaaaagaggttgaaaatggaggtaagacagctggcgtaaaactcaaggagggtgaagaagttagaaaggaggcagtcgaatcttctttggaacgggctttatcgttttactcttcaattcaaacttccgatggtaactgggccagtgacctgggtggtccgatgtttttactacccggcttggttatcgccctttatgtaaccggcgtcctgaatagcgtgctatccaaacatcataggcaggaaatgtgtcgatacgtttataaccaccaaaatgaggatgggggttggggattacatattgaaggaccttcaacaatgttcgggtctgcacttaattatgtcgctttgagactcttaggcgaagacgcaaacgctggtgccatgccaaaagcaagagcgtggatattggatcacggaggtgcgactggtatcacgtcatggggcaaactttggctctcggttttaggagtgtacgagtggagtggcaataatcctctaccacctgaattttggctgtttccttatttcttgccgttccatcccgggcgaatgtggtgtcattgcagaatggtatatttaccaatgagttacctctatggtaagcgttttgtaggtccaattactcctatagttttgtctttacgcaaagaactatacgctgtcccataccatgagatcgattggaacaagtcgcgtaatacatgtgctaaagaagatctttattacccccacccgaaaatgcaggacattctgtgggggtcattgcatcacgtttatgagcccttatttaccagatggccggcgaaaagactaagggaaaaggctttgcaaactgccatgcaacatatacactacgaagatgaaaacacaagatacatttgtttagggcctgtaaataaagtgttgaatttactttgctgttgggtagaagacccatatagcgatgcatttaagctccatttgcagagggttcacgactatttatgggtcgctgaagatggaatgaaaatgcaaggttataatggatctcaattgtgggacacagcatttagcattcaggccattgtctctactaaactcgttgataactacggcccaacgctacggaaggcccatgatttcgtgaaaagcagtcagatacaacaagattgccctggcgatccaaacgtgtggtataggcatatacacaagggtgcttggccattctcaacaagagatcatggttggctgatctccgattgtacagctgagggattaaaggcggcattaatgttgtctaaattaccgagtgaaaccgttggtgagagcttggaaagaaatagactgtgtgatgccgtgaatgtgttgctttccctgcaaaatgacaatggaggtttcgcgtcgtatgaactaactcgatcttatccttggttagaacttatcaaccccgcagaaacctttggggatattgttatcgattatccatacgtggagtgtacttcagcaaccatggaggctttgacactgtttaaaaaacttcatcctggacatcgtactaaggaaattgatacggccatagtacgcgcagctaactttctagaaaatatgcaaagaactgatggtagttggtacggttgctggggcgtttgtttcacttacgctggctggtttggaattaaaggtctagtagctgccggacgtacatataacaattgcttggccattagaaaggcttgtgactttctcttatcaaaagaactacctggtggtgggtggggagagtcttatcttagctgccagaacaaagtatatactaatttggaaggcaacaggccacaccttgttaacacagcatgggtattgatggctctgattgaagctggtcaagctgaacgagacccaacgcccttacacagagcagcaagactgctgatcaattcacagttagaaaatggtgatttccctcagcaagagatcatgggcgtttttaacaagaattgtatgattacttacgccgcatatcgtaacatatttccgatttgggcattaggggaatactgccatagggtgcttactgaataa

SEQ ID NO: 218 - DNA, 2292 bp, Artificial Sequence
  Synthetic
atgtggcgtttgaaagttggtggtgagtctgtcggagaaaaggaagaaaagtgggttaaatcaatatccaatcatttaggtagacaagtctgggaattttgccctcacgatggtacaccagaacagagattgcaagttcaaaaggcaagagacgctttcttcagaattaacagatttcgtagaaagcaatcttccgatttattcttggctatccaatatgaaaaggagatcgccaacggtgctaccgtcggtggtattaaattgaaggagggtgacgaagttagaaaggaagccgttaagtctactttagaacgtgctttgaatttttactctgctgttcagactaccgacggtaactgggcttccgatttgggtggtccaatgttcttattgccaggtttggtcatcgcattatacgttactggtgtcttgaactctgtcttgtcaaaaaatcacagacaagaaatgtgtagatatttgtacaaccatcaaaacgaagatggtggttggggtttgcacattgaaggtccttccaccatgttcggttctgctttaaactacgttgccttgagattgttgggtgaagatgccgacggtggtgacggtggtgctatgactaaggctagagcttggatcttggacagaggaggtgccaccgccattacatcttggggtaaattgtggttatcagttttaggtgtttatgagtggtctggtaataatccattaccaccagaattttggttgttgccatatttcttaccattccatccaggtcgtatgtggtgtcactgtagaatggtctacttacctatgtcctacttgtacggtaagagatttgttggtcctattactccaatcgtcttgtccttgagaaaggaattgtataccgtcccataccacgaagttgattggaacaagtccagaaatacttgtgctaaagaggatttgtactatccacatccaaagatgcaagacatcttgtggggttctatacaccatgtttacgaacctttgttttcaagatggccaggtaagagattaagagaaaaagctttacaatctgcaatgcagcacattcactatgaagatgaaaacactagatacatatgtttaggtccagttaacaaggtcttgaacatgttgtgctgttgggttgaagatccttactctgatgctttcaagttgcatttacaaagagtccatgactacttatgggtttctgaagatggtatgaaaatgcaaggttacaacggttcccaattgtgggacactgccttctcaattcaagctattgcttcaacaaagttagttgactcttatggtccaaccttgagaaaggcacacgacttcgtcaaaaactctcaaatccagcaagattgtccaggtgattccaatgtctggttccgtcatatccacaagggtgcctggcctttctctactagagaccacggatggttgatttctgattgcaccgctgaaggtttgaaggcttcattgatgttgtctaagttaccatccgaaatagtcggtccatctttggagaaaaacagattgtgtgatgcagttaatgttttgttgtctttgcaaaatgacaacggtggttttgcttcctacgaattaacccgttcttacccatggttagaattgatcaacccagcagaaacattcggtgacatcgtcattgattattcatacgttgaatgtacttccgctacaatggaagctttgaccttgtttaagaagttgcacccaggtcatagaactaaagaaattgacaccgccatcggaaaggctgccaacttcttggagaagatgcaacgtactgatggttcttggtacggttgctggggtgtttgtttcacttacgctggttggtttggtattaaaggtttggttgctgctggtagaacatacaattcctgtatagctattcgtaaggcatgtgatttcttgttgtccaaggaattaccaggtggtggttggggtgaatcttacttgtcttgtcaaaacaaagtttacactaatttggaaggtaacagacctcacttagttaacaccgcctgggtcttgatggccttgatcgaagctggtcaagctgagagagaccctgctcctttgcacagagctgccagattattgataaattcccaattagaaaacggtgatttcccacaagaagaaattatgggtgtttttaataagaactgtatgatcacctatgcagcttatagaaacatctttccaatttgggccttaggtgaatactgccatagagttttaactgagtaa

SEQ ID NO: 219 - DNA, 2328 bp, Artificial Sequence
  Synthetic
atgggtagacgtgagagatggggcggtagaagagaaataatgtggagattgaaagttggtggtgaatccgtcggtgaaaaggaagaaaagtgggttaaatctatttcaaaccacttaggtagacaagtttgggaattttgtccacatgacggtacacctgaacagcgtttgcaagtccaaaaggcaagagatgctttcagaatcaatcgtttcagaagaaagcaatcttctgacttgtttttggctatccaatacgagaaggaaattgccaacggtgctactgtcggtggtattaaattaaaggagggtgatgaagtcagaaaagaagccgttaagtccaccttggaaagagctttaaacttctattccgctgttcaaactaccgatggtaattgggcctctgacttgggtggtccaatgtttttattgcctggtttggttatcgctttatacgtcactggtgttttgaactctgttttgtcaaagaatcaccgtcaggaaatgtgcagatacttgtataaccatcaaaacgaagacggtggttggggtttgcacattgaaggtccatccaccatgttcggctctgcattaaattacgttgctttaagattgttgggtgaggatgctgatggtggtgacggtggtgctatgacaaaggcacgtgcctggatcttggacagaggtggtgctactgctataacttcatggggtaaattgtggttgtccgtcttgggtgtctatgaatggtccggtaacaatccattgccaccagaattttggttattaccatacttcttgcctttccacccaggtagaatgtggtgtcattgtagaatggtttatttgcctatgtcatacttgtacggtaagcgtttcgtcggtccaattaccccaattgttttgtctttaagaaaggaattgtacactgttccataccacgaggttgattggaataaatctcgtaacacttgtgccaaggaagacttgtactatccacacccaaaaatgcaagatatcttgtggggttctatccatcacgtctacgaaccattattttctcgttggcctggtaagagattgagagaaaaggctttacaatctgctatgcagcatattcattatgaggatgaaaacaccagatacatttgcttgggtcctgttaacaaagttttaaatatgttgtgttgttgggttgaagatccatattcagatgcatttaagttgcacttgcaaagagttcacgactacttatgggtctccgaagatggtatgaagatgcaaggttacaatggttcccaattgtgggacacagccttctctatacaagctatcgcttcaacaaagttagtcgattcttatggtccaaccttaagaaaggctcatgactttgtcaaaaactctcaaattcaacaagattgcccaggcgattccaacgtctggttcagacatatacacaagggtgcctggccattctcaactagagaccacggttggttgatttccgactgtactgccgaaggtttgaaggcttctttaatgttatctaagttgccatctgaaatcgttggtccttctttagagaaaaacagattgtgtgacgctgttaacgtcttattgtccttgcaaaacgataatggtggttttgcatcttacgaattaaccagatcctacccttggttggaattgattaatccagcagaaactttcggtgacatcgttattgactactcttatgttgaatgtacatccgctaccatggaagctttaactttgttcaagaagttgcacccaggtcatagaaccaaagaaatcgacaccgccataggtaaggctgctaacttcttggagaagatgcaacgtactgacggttcttggtacggttgctggggtgtctgtttcacttacgccggttggtttggtatcaagggtttagtcgctgctggtagaacttataactcctgtatcgctattagaaaggcatgtgattttttgttgtctaaggaattacctggtggtggttggggcgagtcttacttgtcctgtcaaaacaaagtctacactaacttagaaggtaatagaccacacttggttaatactgcatgggtcttaatggctttgattgaagccggtcaggctgaaagagacccagccccattgcatagagctgcccgtttattgattaattcacaattggagaacggtgatttcccacaagaagaaattatgggtgtcttcaacaaaaactgcatgataacctatgctgcatacagaaatatctttccaatctgggctttgggtgaatattgtcacagagttttgacagaataa

SEQ ID NO: 220 - DNA, 2274 bp, Artificial Sequence
  Synthetic
atgtggaaattgaaggtcgccgagggtggctctccatggttacgtacattgaatggtcacattggtagacaagtttgggaatttgaccctaacttgggttccccaaaggatttagaagaaatagaaaagttcagagcagaattttataaaaacagattcgaaactaagcattcatctgatttgttaatgagataccagttctcaaaggaaaacccagttggtaccatcttgccaagagtccaagttaaggacatcggtgatattaccgaggacaatgtcgctactaccttgcgtagagctatttccttttactctactttgcaagctcacgatggtcattgggccgctgactgtggtggtccaatgttcttgttacctggtttagttatcgctttgtctgttacaggtgccttgaacgctgtcttgtctgaagaacacaaaagagagatctgccgttacttatataatcatcaaaactgtgacggtggttggggtttgcacattgaatcccactcaactatgttcggttctgtcttatcttacgttactttgagattgttaggtgaaaaggcaaatggtggtgaaggtgctatggagaagggtagaaaatggatattggatcatggtaccgccactgctattacttcctggggtaagatgtggttgtccgttttgggtttgtttgattggtctggcaacaacccattgcctccagaaatgtggttattgccatacattttgccattccatccaggtagaatgtggtgtcactgccgtatggtttatttacctatgtcttacttatatggtaaaagatttgtcggtccaatcacccctacagttttgtctttaagaaaggaattgttcactgtcccataccacaagatcaattggaacaaggctagaaacgaatgtgctaaggaagatttgtattacccacaccctttgttgcaagacatattatggacttccttggataaattgatcgaaccattgttcatgcattggccaggtaaaaaattgagagaaaaggccttatccaccgttatggaccacattcactacgaagatgaaaatacccgttatatttgtttgggtccagtcaataaggttttaaacatgttatgttgctgggtcgaagattcatcttctgaagcttttaagttacatttgccaagattgtacgactatttatggattgcagaggacggtatgaaaatccaaggttataacggttcccaatcatgggatacctccttcgctatacaggccattatttctactaatttggtcgaggaatacggcccaacattaagaaaggcacacaagtttatgaaaaactcccaagttttggacgattgtcctggtaacttggacttctggtaccgtcacatctcaaagggtgcttggccattctccactgctgatcatggttggccaatttctgactgtacagctgagggtttgaaagcctgtttattgttgtcaaagttgcctgttgaaatcgttggtgaaccattgaaggctaacagattgtacgatgcagttaatgtcatgttatctttgcaaaatccagatggtggtataggtacctacgaattgtctcgttcatatccatggttggaaattatcaatccagctgaaacctttggtgacatcgttatcgattacccatatgttgaatgtacctctgccattatccaggctttagctgctttcaagaaattataccctggttatagaaaggaggatgtcgaaagatgtattgaaaaaggtgctgccttcatagagaagattcaagaagctgacggttcttggtacggttgctggggtgtttgttttacttacggtacttggtttggtgttaagggtttgttggatgcaggtagaaactttaacaactcctacaacattagaaaggcctgtgatttcttattatccaagcaagtcgtctccggtggttggggtgaatcttatttatcttgtcagaacaaggtttataccaacttgaagggtaacaagtctcattccgtttgtacagcttgggctatgttggctttgattgaagcaggtcaaggtgagagagaccctactccattacatagagctgccaaagtcttgattaattctcaattagaaaatggtgatttcccacaacaagaaatctctggtgtcttcaacaaaaactgcatgatctcctactctgcatacagaaatattttcccaatctgggctttgggtcaataccaatctcaattgttgaatccacaataa

SEQ ID NO: 221 - DNA, 2307 bp, Artificial Sequence
  Synthetic
atgtggaaattgaaggttgcagccgagggtgggggtggtcctttattgagatctactaatcgttttgtcggtagaacagtttgggaatttgaaccagatttaggtaccccagaacaaagagctgaagtcgagaaggctagaagagacttctcagatcatagattccagcgtagacactccgctgacgttttgatgcgtatgcaaatgcaacaatactctaaaggtactccattgaagttagatttgccagctgtcaagaagttgggtgaagacgaagatgttactgaagaagccgtttccacctctttgaagagagctatcaacagagtctctgctttacaagcccacgacggtcattggccaggtgattgttccggtcctttgttcttgttgccaggtttaattataaccttgtatgttacaggtgccttgaacgcagtcttatcatctgaacaccaaagagaaattagaagatacttatacaatcaccaaaacgaagatggtggttggggtttgcatatggaaggtcactccgctatgttgggtactaccttgaattatgttgcattaagattaatcggtgagggtccagactctggtggggacgatggtgctgctatggaaagaggtcgtaactggattttgcagagaggtggtgccacttacacaacttcatggggtaaattctggttgaccgttttgggtgtctacgactggtccggtaacaatccattgcctcctgaaatgtggttgttgccatatcatttaccatttcatccaggtagaatgtggtgccactgtcgtgctgtttatttgccaatgtcttacgtttacggtaagagattcgtcggtcgtatcactccattggttttagagttgagaaacgaattgtacggtgatccatattcattgatagattggaataaagctagaaaccaatgtgctaaggaagatttgtattacccacactcctttttacaagacgttttgtgggctaccttgcataaattcgtcgaacctgttatgatgcattggccaggtattaagttcagagaaatcgccttaagaaccgctatgagacacatccactacgaagacgaatctacacgttacattaacttgggtcctgtcaacaaggttttgaacatgttagcttgttggattgaggatccaaattctgaagcttttaagttgcacgtcccaagaatttatgattacttgtggttagctgaagacggtatgaagatgaaaggttacaacggttctcagttgtgggacgctggtttgactgttttggccatcgttaataccgacttaatcgaggaatttggtccaactttaaagttggcccatgcattcgtcaaaaactcacaaataattgacaattgtttggaagatttgaaccaatggtatagacacatgtctaaaggtggttggcctttttccaccgctgaccacggttggtgcgtttccgattgtactgcaactggtttagaagccaccttgttattgtctactatatccccacaaatcgtcggtgaggctatggaagttggtagagtttacgatggggttaactgtttgatttcattgatgaacaataatggtggtttcgcaaccttcgaattgactagatcctatgcttggttagaacatattaacccttcagaaactttcggtggtatcatgatcgattacccatacgtcgaatgcacatcttcttctatacaagccttagcattattcaagaagttgtacccaagacacagaactgaagagatcgactcttgtatttccaagggtgctaactttattgagtcaatgcaaagaaatgatggttcttggtatggttcttggggtgtctgttttacttacgctacatggttcgctgttttcggtttggcttgtgccggtagaacatttgaagattccccagctataaaaaaggcttgcgaatttttattatctaaggaattgccatccggtggttggggtgaatcttacttgtcctgtcaagataaggtctacaccaatttggaggggatgagacctcatgccgtcaacacatcttgggctatgttggctttgattcgtgttggtcaagctgaaagagacccagcaccattgcacagagctgcaagagttttgattaacttgcaatccgaagacggtgaatttccacaacaggagatcatcggtgttttcaatcagaactgtatgattggttactctcaatatagaaacatcttcccaatttgggctttaggtgaataccgtactaaagtccatgtcccacgtaaaaagtaa

SEQ ID NO: 222 - DNA, 2274 bp, Artificial Sequence
  Synthetic
atgtggcgtttgaagtttgctgagggtggatcaccatggttaagaacaactaataaccatgttggtagacaagtctgggaatttgaccctagattgggtaccccagaagaattggcagaaatagaggaagctagaaaatccttcgccgaaaacagattcgttcacaagcactcttctgatttattgatgcgtttacagttctccagagagaatccagtcagacaagttttgccacaagtcgaagttaaggatactgacgatatctctaaagaagctgtcaagtctaccttggaaagagccttgtcattctattcagctgttcaaacttctgacggtaactgggcatctgacttaggtggtcctatgtttttgttaccaggtttggtcattgctttgtccatcaccggtgctttgaatgccgttttatccgaacaacataagcaagaaatgtgccgttacttgtacaaccaccagaacgaagatggtggttggggtttacatattgaaggtccttctactatgttcggttctgttttgaactatgttacaatgagattgttgggtgaaggtccaaacgatggtgacggtgctatggaaaagggtagagactggattttgaatcacggtggtgctacctacatcacctcctggggtaaaatgtggttaactgtcttaggtgtttttgagtggtctggaaacaatccattgcctccagaaatttggttgttgccatacatattaccaatccacccaggtagaatgtggtgtcattgtagaatggtctatttgccaatgtcttacttgtatggtaaacgtttcgtcggtcctattaccccaactgttttatccttgagaaaggaattattcaccgttccataccatgaggtcgattggaacaaggcaagaaatttgtgtgctaaggaagatttatactacccacacccagttgttcaagacattttgtgggcctctttgcataaggttgttgaaccaatattgatgcgttggccagtcactaaattgagagaaaaagcattaagaactgctatcgaacacatccattatgaagacgagaatacaagatatatctgcttgggtcctgttaacaaggtcttaaatttgttgtgttgttgggtcgaagatccttactcagatgcttttaagttgcacttgcaacgtgtccacgattacttgtgggtcgctgaagacggtatgaaaatgcaaggttataacggttctcaattatgggataccgccttttccattcaagctattttcgctactaactttgttgaagagtacggtgacgtcttgaagaaggctaactcctacataaaagattcccaaattcaagaggactgtccaggtgacccaaacgtttggttcagacacatccacaagggtgcctggcctttctctaccagagatcatggttggttaatctcagattgtactgctgaaggtttgaaagcctcattgatgttgtccaagttgccatctaccatggttggtgaaccattggaagctaatagattgtgcgacgcagtcaacgttttgttatcattgcagaatgataacggtggtttcgcttcctacgaattgacaagatcttacccatggttagaattaattaacccagccgaaactttcggtgacatcgttattgactatccatatgtcgaatgtacttctgcaaccatggaggctttaaccttatttaagaagttgcacccaggacatagaacaaaggaaatagatcaatgtatcaagaaggctgctaagttcttggaaaaaatgcaaagagcagatggttcctggtacggttgttggggtgtctgtttcacttacgctggttggtttggtataaaaggtttagttgctgccggtagaacttacaactcttgtttggcaattagaaaggcttgtgaatttttgttatctaaggaattgccaggtggtggttggggtgagtcatatttatcctgccaaaataaggtttacactaacttggaaggtaataagcctcatttggtcaacactgcctgggtcttgatggccttgattgaagctggtcaacacgaacgtgacccaaagcctttgcatcgtgctgctagatatttgatcaattcccaattagaaaatggtgatttcccacagcaagaaattatgggtgttttcaacaaaaactgtatgatcacatacgccgcttacagaaacatttttcctatttgggctttaggtgaatacagatctcaagttttgcaagctgcataa

SEQ ID NO: 223 - DNA, 1992 bp, Artificial Sequence
  Synthetic
atggaccgtcagtcatttagagataatagattccatagaaagcaatcttccgatttgttcttagccatacaatttgcagaagagaaacaatctgtcactaacttgccacaaacaaagttagaagaatttgaagacgttaagaaagaggctgttaagtccaccttggaaagagctttgtctttctactccgctgtccaaacttctgacggtaactgggcctctgatttgggaggtcctatgttcttattgccaggtttggttattaccttatatgtcaccggtgctttgaatactgttttgtcaaaagaacaccagtacgaaatctgtcgttatttgtacaaccaccaaaacagagacggtggttggggtttacatatcgaaggtccatcaactatgtttggtacagttttgaattacgtttctttaagattgttaggtgaaggtgctgaaggtggtgagggtgctattgaaaaggctagacgtatgtggtgccactgtagaatggtctacttgccaatgtccttcttgtatggtaagaaattcgttggtccaattactcctaccatcttatccttgagaaaggaattatacaccgtcccataccatgaagttgattggaacaaggccagaaatgcatgtgccaaggaagatttgtattaccctcacccattggttcaagacattttgtgggcttctttgcactacttgtatgaaccaatgttgaagtactggccttgtaaatctttgagagagaaggccttacaaatcgttatgcaacatatccactatgaagacgaaaacactcgttatatttgcttaggtccagtcaataaagtcttaaacatgttgtgttgttgggtcgaggatccatactccgaatcttttaagttgcacttgccacgtatattggactacttgtggattgctgaagatggtatgaagatgcaaggttacaacggttctcaattatgggatacagctttcgctatacaagcaattatctccaccggtttagctgacgagtacggttccgttttgagaaaggctcatgacttcttaaaagattcacaaatccaagaagactgtccaggagatccaaacgtctggtttagacacattcataaaggtgcttggccattttctactagagatcatggttggttgatttccgattgcactgccgaaggtttaaaggcttctttgatgttgtctaagttgccatcaactatggtcggtgaacctttggaagttaatagattatgtgatgctgttaacgttttattgtctttgcagaacgacaatggtggtttcgcctcctatgaattaaccagatcatacccatggttggaattgattaacccagctgagaccttcggtgatatcgttatcgactacccatatgttgaatgtacctctgctactatggaagccttaacattgtttaagaaattacacccaggtcatagaacaaaggaaattgatataggtagagctgtcgaatttttggagaagatgcaaagagcagacggttcctggtatggttgttggggtgtttgcttcacttacgcaggttggttcggtatcaagggattggtcgctgctggtagaacctataattcctgtttggctattagaaaggcttgcgaatttttgttatctaaagaattacctggtggtggttggggtgaatcctacttgtcctgtcagaacaaggtttacacaaatttggaaggtaacaagccacacttggttaatactgcatgggtcttgatggcattaattgaggccggtcaagctgaacgtgatcctaccccattacacagagctgctaaaatcttaattaattctcaaatggaagacggtgatttcccacaagaagagatcatgggtgtttttaacaagaactgtatgatctcttactccgcttacagaaacattttcccaatatgggccttgggtgaatatcattgtcgtgtcttgcaggcaccataa

SEQ ID NO: 224 - protein, 756 aa, Spinacia oleracea
MWRLKIAEGGSPWLRTTNNHVGRQIWEFDPNLGTPEQIREVEEARENFWKNRFEQKHSSDLLMRMQFAQENSSNVVLPQVKVKDEDEITKEAVKSTLERALSFYSAVQTSDGNWASDLGGPMFLLPGLVIALSVTGALNAVLSKEHQKEMCRYLYNHQNKDGGWGLHIEGHSTMFGTVLTYVTLRLLGEGVDDGDGAMERGRKWTLEHGSATAITSWGKMWLSVLGVFEWAGNNPMPPETWLLPYILPVHPGRMWCHCRMVYLPMSYLYGKRFVGPITPTVLSLRRELFDVPYHEIDWDRARNECAKEDLYYPHPLVQDILWASLHKAVEPILMRWPGKKLREKALSTVMEHIHYEDENTRYICLGPVNKVLNLLCCWVEDPYSDAFKLHLQRVHDYLWVAEDGMKMQGYNGSQLWDTAFSIQAILATNLGEEYGGTLRKAHNFIKDSQIQEDCPGDPNVWFRHIHKGAWPFSTRDHGWLISDCTAEGLKASLMLSKLPSTMVGEPLEVNRLCDAVNVLLSLQNDNGGFASYELTRSYPWLELINPAETFGDIVIDYPYVECTSATMEALTLFKKLHPGHRTKEIDNCIKKAAKFLEKMQRADGSWYGCWGVCFTYAGWFGIKGLVAAGRTYNSCLAIRKACEFLLSKELPGGGWGESYLSCQNKVYTNLEGNKPHLVNTAWVLMALIEAGQAKRDPMPLHRAAKVLINSQMPNGDFPQQEIMGVFNRNCMITYAAYRNIFPTWALGEYRTQVLQK

SEQ ID NO: 225 - protein, 761 aa, Aquilaria agallocha
MWRLKTGSETVGDNGRWLRSTNNHVGRQVWEFFPEMGSPEELVAIEAAHREFHLNRFHKQHSSDLLMRLQYEREKPCVQKEGAVRLDATETPTEAAVETTLRRALTFYSTMQSDDGNWASDLGGPMFLLPGLVIALYVTGVLNSVLSKEHQREIRRYLYNHQNQDGGWGLHIEGPSTMFGSALNYVTLRLLGEGPDDGEGAMERARQWILSRGGAVAVTSWGKLWLSVLGVYEWDGNNPLPPELWLLPYSLPLHPGRMWCHCRMVYLPMSYLYGKRFVGPITPTVLSLREELYPIPYHHVDWNKARNTCAQDDLYYPHPFVQDLLWGSLYHVYEPLVMRWPGKRLRERALQHVMKHIHYEDENSRYICLGPVNKALNMLCCWVEDPHSEAFKMHIPRIYDYLWIAEDGMRMQGYNGSQLWDTAFSVQAIVATKLTDEFSETLAKANKYILDAQILKNCPGDPNVWFRHIHKGAWPFSTRDHGWLISDCTAEGLKASLMLSKLPSKIVGEPLEKNRLYDAVNVLLSLQNENGGFASYELTRSYPWLELINPAETFGDIVIDYTYVECTSATMEALTLFKKLHPGHRKKEIERCMANAAKFLEMRQEADGSWYGCWGVCYTYAGWFGIKGLVAAGRTYNNCANIRRACDFLLSKQLPNGGWGESYLSCQNKLYTNLNNDRMHTVNTAWAMMALIEAGQAKTDPMPLHHAARTLINAQMETGDFPQQEIMGVFNKNCMITYAAYRNVFPVWALGEYHHRVLNGC

SEQ ID NO: 226 - protein, 761 aa, Aquilaria agallocha
MWRLKTGSETVGDNGRWLRSTNNHVGRQVWEFFPEMGSPEELVAIEAAHREFHLNRFHKQHSSDLLMRLQYEREKPCVQKEGAVRLDATETPTEAAVETTLRRALTFYSTMQSDDGHWANDLGGPMFLLPGLVITLTITGTINVVLSKEHQREIRRYLYNHQNQDGGWGLHIEGPSTMFGSALNYVTLRLLGEGPDDGEGAMERARQWILSRGGAVAVTSWGKLWLSVLGVYEWDGNNPLPPELWLLPYSLPLHPGRMWCHCRMVYLPMSYLYGKRFVGPITPTVLSLREELYPIPYHHVDWNKARNTCAQDDLYYPHPFVQDLLWGSLYHVYEPLVMRWPGKRLRERALQHVMKHIHYEDENTEYICLGPVNKALNMLCCWVEDPHSEAFKMHIPRIYDYLWIAEDGMKMQGYNGSQLWDTAFAVQAIVATKLTDEFSETLAKANKYILDAQILKNCPGDPNVWYRHITKGAWSFSTADQGWLVSDCTAEGLKALLLYSMLPHQKAPSSIEKNRLYDAVNVLLSMQNADGGFASFELTRSYPWLEMINPAETFGDIVIDYTYVECTSAVIQALALFKRLHPGHRKKEIERCMANAAKFLEMRQEADGSWYGCWGVCYTYAGWFGIKGLTSCGRTYNNCANIRRACDFLLSKQLPNGGWGESYLSCQNKLYTNLNNDRMHTVNTAWAMMALIEAGQAKTDPMPLHHAARTLINAQMETGDFPQQEIMGVFNKNCMISYAGYRNVFPVWALGEYHHRVLNGC

SEQ ID NO: 227 - protein, 741 aa, Aquilaria agallocha
MWRLKIAEGKEGPYLKSTNNFVGRQTWEFDPDAGTPEERAAVEEARRAFYSNRYRVKPPADLLWRLQFMREKNFKQIIPMVRIKDGEAITHEKATATLRRAVHFLTVLQSIDGHWPAENAGCHYFLPPLVFCLYITGHLSSVFSQEHQREILRYIYNHQNEDGGWGLHIEGHSIMFSTALSYICLRILGEGLEGGQDNACAKAQKWILDHGSVTHIPSWGKTWLSVLGLFDWSGSNPIPPEFWMLPSFLPIHPGKIWSYCRTTYMPMSYLYGKKFVAPITPLIIQLRKELYLQPYDEINWRKVRHLCAKEDLYYPHPVIQDLMWDCLYVFTEPLLNRWPLNKMIREKALKVTMNHIHYEDENSSYINMACVGKVLCTLACWVEDPNGDYFKKHLARIPDYIWVAEDGMTMQGLASQTWDSGLAIQALFASNLIDEIGPTLKRAHDFIKKSQVLDNPFGDFKKMFRHSSKGSWTFSVRDHGWPVSDCTAEGLKCCLLLSMLPQEIVGEKLEVERLHDAVNIIFHLQSKNGGVAAWEPVRASKWLELLNPIEFLEDIVVDHEYLECTASSIDALQLFKKLYPTCEREEIENFILKAVEYIENIQMSDGSWYGNWGVCFIYGTLFALKGLAKAGKTYDDCVAMRKGVDFLLRIQRDDGGWGESYKSCPNKKFEPLQREGSNVVQTAWAILGLIESRQIMRDPTPLHRAIKFIINSQLEDGDFPQQVRGLSYIYSSLSFLPVIKM

SEQ ID NO: 228 - protein, 766 aa, Benicasa hispida
MWRLKIGADTVLTDPSNAGGRWLSTLSNHLGRQVWEFCAELGSPEDLQQIQHARQRFSDHRFEKKHSTDLLMRMQFAKENSSFVNLPQIKVKDKEDVTEEAVTRTLKRAINFYSTIQAHDGNWASDLGGPMFLLPGLVIALYVTGVLNSVLSTEHQREICRYLYNHQNRDGGWGLHIEGPSTMFGSVLNYVTLRLLGEEAEDGQGGVDKARKWILDHGGATAITSWGKMWLSVLGVYEWAGNNPLPPELWLLPYLLPCHPGRMWCHCRMVYLPMCYLYGKRFVGPITPIIRSLRKELYLVPYHEVDWNVARNQCAKEDLYYPHPLVQDVLWASLHHVYEPLFMCWPAKRLREKALRTVMQHIHYEDENSRYICLGPVNKVLNMLCCWVEDPHSEAFKLHIPRLYDYLWIAEDGMRMQGYNGSQLWDTAFSVQAIMSTKLSEEYGTTLRKAHKYIQDSQVQEDCPGDPNVWFRHIHKGAWPFSTRDHGWLISDCTAEGLKASLMLSKLPSKIVGEPLEKERLYDAVNVLLSLQNENGGFASYELTRSYPWLELINPAETFGDIVIDYPYVECTSAAIQALAAFKKLYPGHRSNEIGNSIAKAADFIESIQATDGSWYGSWGVCFTYAGWFGIKGLVAAGRTYNSCSSLRKACDFLMSKELAAGGWGESYLSCQDKVYTNIKDDRPHLVNTGWAMLSLIDAGQAERDPTPLHRAARILINSQMEDGDFPQEEIMGVFNKNCMITYAAYRNIFPIWALGEYRCRVLQAS

SEQ ID NO: 229 - protein, 764 aa, Citrullus colocynthis
MWRLKVGAESVGEKEEKWLKSISNHLGRQVWEFCAHQPTASPNHLQQIDNARNHFRNNRFHRKQSSDLFLAIQNEKEIANVTKGGGIKVKEEEDVRKETVKNTVERALSFYSAIQTNDGNWASDLGGPMFLLPGLVIALYVTGVLNSVLSKHHRQEMCRYLYNHQNEDGGWGLHIEGTSTMFGSALNYVALRLLGEDADGGEGGAMTKARSWILDRGGATAITSWGKLWLSVLGVYEWSGNNPLPPEFWLLPYCLPFHPGRMWCHCRMVYLPMSYLYGKRFVGPITPIVLSLRKELYTIPYHEIDWNRSRNTCAKEDLYYPHPKMQDILWGSIYHLYEPLFTRWPGKRLREKALQMAMKHIHYEDENSRYICLGPVNKVLNMLCCWVEDPYSDAFKFHLQRVPDYLWVAEDGMRMQGYNGSQLWDTAFSVQAIISTKLIDSFGTTLKKAHDFVKDSQIQQDCPGDPNVWFRHIHKGAWPFSTRDHGWLISDCTAEGLKASLMLSKLPSKIVGEPLEKSRLCDAVNVLLSLQNENGGFASYELTRSYPWLELINPAETFGDIVIDYPYVECTSATMEALTLFKKLHPGHRTKEIDIAVARAANFLENMQRTDGSWYGCWGVCFTYAGWFGIKGLVAAGRTYNSCVAIRKACDFLLSKELPGGGWGESYLSCQNKVYTNLEGNRPHLVNTAWVLMALIEAGQAERDPAPLHRAARLLINSQLENGDFPQEEIMGVFNKNCMITYAAYRNIFPIWALGEYFHRVLTE

SEQ ID NO: 230 - protein, 764 aa, Citrullus colocynthis
MWRLKVGAESVGEKEEKWLKSISNHLGRQVWEFCADQPTASPNHLQQIDNARKHFRNNRFHRKQSSDLFLAIQNEKEIANGTKGGGIKVKEEEDVRKETVKNTVERALSFYSAIQTNDGNWASDLGGPMFLLPGLVIALYVTGVLNSVLSKHHRQEMCRYLYNHQNEDGGWGLHIEGTSTMFGSALNYVALRLLGEDADGGEGGAMTKARGWILDRGGATAITSWGKLWLSVLGVYEWSGNNPLPPEFWLLPYCLPFHPGRMWCHCRMVYLPMSYLYGKRFVGPITPIVLSLRKELYTIPYHEIDWNKSRNTCAKEDLYYPHPKMQDILWGSIYHLYEPLFTRWPGKRLREKALQMAMKHIHYEDENSRYICLGPVNKVLNMLCCWVEDPYSDAFKFHLQRVPDYLWIAEDGMRMQGYNGSQLWDTAFSVQAIISTKLIDSFGTTLKKAHDFVKDSQIQQDFPGDPNVWFRHIHKGAWPFSTRDHGWLISDCTAEGLKASLMLSKLPSKIVGEPLEKSRLCDAVNVLLSLQNENGGFASYELTRSYPWLELINPAETFGDIVIDYPYVECTSATMEALTLFKKLHPGHRTKEIDTAVAKAANFLENMQRTDGSWYGCWGVCFTYAGWFGIKGLVAAGRTYSTCVAIRKACDFLLSKELPGGGWGESYLSCQNKVYTNLEGNRPHLVNTAWVLMALIEAGQAERDPAPLHRAARLLINSQLENGDFPQEEIMGVFNKNCMITYAAYRNIFPIWALGEYFHRVLTE

SEQ ID NO: 231 - protein, 764 aa, Cucurbita maxima
MWRLKVGAESVGEKDEKWVKSVSNHLGRQVWEFCADAAADTPHQLLQIQNARNHFHHNRFHRKQSSDLFLAIQYEKEIAKGAKGGAVKVKEGEEVGKEAVKSTLERALGFYSAVQTSDGNWASDLGGPMFLLPGLVIALHVTGVLNSVLSKHHRVEMCRYLYNHQNEDGGWGLHIEGTSTMFGSALNYVALRLLGEDADGGDGGAMTKARAWILERGGATAITSWGKLWLSVLGVYEWSGNNPLPPEFWLLPYSLPFHPGRMWCHCRMVYLPMSYLYGKRFVGPITPKVLSLRQELYTIPYHEIDWNKSRNTCAKEDLYYPHPKMQDILWGSIYHVYEPLFTRWPGKRLREKALQAAMKHIHYEDENSRYICLGPVNKVLNMLCCWVEDPYSDAFKLHLQRVHDYLWVAEDGMRMQGYNGSQLWDTAFSIQAIVATKLVDSYAPTLRKAHDFVKDSQIQEDCPGDPNVWFRHIHKGAWPFSTRDHGWLISDCTAEGLKASLMLSKLPSTMVGEPLEKNRLCDAVNVLLSLQNDNGGFASYELTRSYPWLELINPAETFGDIVIDYPYVECTAATMEALTLFKKLHPGHRTKEIDTAIGKAANFLEKMQRADGSWYGCWGVCFTYAGWFGIKGLVAAGRTYNSCLAIRKACEFLLSKELPGGGWGESYLSCQNKVYTNLEGNKPHLVNTAWVLMALIEAGQGERDPAPLHRAARLLMNSQLENGDFVQQEIMGVFNKNCMITYAAYRNIFPIWALGEYCHRVLTE

SEQ ID NO: 232 - protein, 774 aa, Cucumis melo
MWRLKVGKESVGEKEEKWIKSISNHLGRQVWEFCSGENENDDDEAIAVANNSASKFENARNHFRNNRFHRKQSSDLFLAIQCEKEIIRNGAKNEGTTKVKEGEDVKKEAVKNTLERALSFYSAVQTSDGNWASDLGGPMFLLPGLVIALYVTGVLNSVLSKHHRQEMCRYIYNHQNEDGGWGLHIEGSSTMFGSALNYVALRLLGEAADGGEHGAMTKARSWILERGGATAITSWGKLWLSVLGVYEWSGNNPLPPEFWLLPYSLPFHPGRMWCHCRMVYLPMSYLYGKRFVGPITPIVLSLRKELYTIPYHEIDWNRSRNTCAKEDLYYPHPKMQDILWGSIYHVYEPLFSGWPGKRLREKAMKIAMEHIHYEDENSRYICLGPVNKVLNMLCCWVEDPYSDAFKFHLQRIPDYLWLAEDGMRMQGYNGSQLWDTAFSIQAIISTKLIDTFGPTLRKAHHFVKHSQIQEDCPGDPNVWFRHIHKGAWPFSTRDHGWLISDCTAEGLKASLMLSKLPSKIVGEPLEKNRLCDAVNVLLSLQNENGGFASYELTRSYPWLELINPAETFGDIVIDYSYVECTSATMEALALFKKLHPGHRTKEIDAAIAKAANFLENMQKTDGSWYGCWGVCFTYAGWFGIKGLVAAGRTYNNCVAIRKACNFLLSKELPGGGWGESYLSCQNKVYTNLEGNKPHLVNTAWVMMALIEAGQGERDPAPLHRAARLLINSQLESGDFPQQEIMGVFNKNCMITYAAYRNIFPIWALGEYSHRVLDM

SEQ ID NO: 233 - protein, 723 aa, Coccinia grandis
MWRLKLGKGENEDYLFSTNDFIGRQTWEFDPNAGTPQERAQVEAARLNFYQNRNHVQCSSDLLWRFQFLEEKNFKQAIPKVVVEERNGNDRELSIKKETVKTALRRATNFFAALQSNHGHWPAENAGPLYYLPPLVFALYITRDLNTILSKEHQKEILRYVYCHQNEDGGWGLHIASRQSCMLCTVLNYIELRLLGEEADNEACSRARKWILDHGGALYIPSWGKIWLSILGLYEWEGTNPMPPEIWMFGKILPWNLGGLLCYTRLTLLPMSYLYGKRFVGPLTPLILQLRHEIYTQPYNDIKWSPARHLCAKEDEYFERSIFQKLVWDVVTYVGEPILKSWAFKKIRNRAIQIAKWYMDYEDQNSHYITIGCVEKPLFTLTSWVVDPHGEAYKKHLARIKDYLWVGEDGMKMQSFGSQSWDVAFAIQAILATNLHHEFSETLKKGHDFIKQSQVKKNPSGDFPRMYRHISKGSWTFSDQDHGWGVSDCAAENLLCCLKLSTMPSHIVGDSMEPQCFFEAVNFILSLQAKDGGLSAWEPAGTLPLWFEVLNPVEFFEYTVLEIECVECTSSAIQALVLFKKLFPSHRKKEIDNFIEKATNYIKEIQKEDGSWYGNWGICHIYGTYFAIKGLAAAGNTYENCSTVTKAVDFLLKIQCPDGGWGESHISCLNKVHTPLPGNASNLVQTSFALMSLIHSQQVCFFLFFFFPSFLPICTLPSLIIIF

SEQ ID NO: 234 - protein, 765 aa, Coccinia grandis
MWRLKVGADTVPADPSKSGGWLSTLSNHLGRQVWEFCAELGSPEDLQQIQHARQHFSDHRFEKKHSADLLMRMQFAKENSSFVNLPQIKVKDKEDVMEEAVTRTLKRAINFYSTIQADDGNWASDLGGPMFLLPGLVIALYVTGVLNSVLSTEHQREICRYLYNHQNRDGGWGLHIEGPSTMFGSVLNYVTLRLLGEEAEDGEGGVDKARKWILDHGGATAITSWGKMWLSVLGVYEWTGNNPLPPELWLLPYLLPVHPGRMWCHCRMVYLPMCYLYGKRFVGPITPIIRSLRKELYLVPYHEVDWNEARNLCAKEDLYYPHPLVQDILWASLHHVYEPLFMRWPAKRLREKALRTVMQHIHYEDENSRYICLGPVNKVLNMLCCWVEDPHSEAFKLHIPRVYDYLWIAEDGMRMQGYNGSQLWDTAFSVQAIISTKLAEEYGTTLRKAHEYIKDSQVLEDCPGDPNVWFRHIHKGAWPFSTRDHGWLISDCTAEGLKASLMLSKLPSKIVGEPLEKERIYDSVNVLLSLQNENGGFASYELTRSYPWLELINPAETFGDIVIDYPYVECTSAAIQALAAFKKLYPGHRSNEIGNCIAKAADFIESIQATDGSWYGSWGVCFTYAGWFGIKGLVAAGRTYNNCLSLRKACDFLLSKELAGGGWGESYLSCQDKVYTNIKDDRPHIVNTGWAMLSLIEVGQAERDPTPLHRAARILINSQMDDGDFPQEEIMGVFNKNCMITYAAYRNIFPIWALGEYRCRVLQAP

SEQ ID NO: 235 - protein, 785 aa, Cucumis sativus
MWRLKVGKESVGEKEEKWIKSISNHLGRQVWEFCAENDDDDDDEAVIHVVANSSKHLLQQQRRQSSFENARKQFRNNRFHRKQSSDLFLTIQYEKEIARNGAKNGGNTKVKEGEDVKKEAVNNTLERALSFYSAIQTGDGNWASDLGGPMFLLPGLVIALYVTGVLNSVLSKHHRQEMCRYIYNHQNEDGGWGLHIEGSSTMFGSALNYVALRLLGEDANGGECGAMTKARSWILERGGATAITSWGKLWLSVLGVYEWSGNNPLPPEFWLLPYSLPFHPGRMWCHCRMVYLPMSYLYGKRFVGPITPMVLSLRKELYTIPYHEVDWNRSRNTCAQEDLYYPHPKMQDILWGSIYHVYEPLFNGWPGRRLREKAMKIAMEHIHYEDENSRYICLGPVNKVLNMLCCWVEDPYSDAFKFHLQRIPDYLWLAEDGMRMQGYNGSQLWDTAFSIQAILSTKLIDTFGSTLRKAHHFVKHSQIQEDCPGDPNVWFRHIHKGAWPFSTRDHGWLISDCTAEGLKASLMLSKLPSKIVGEPLEKNRLCDAVNVLLSLQNENGGFASYELTRSYPWLELINPAETFGDIVIDYSYVECTSATMEALALFKKLHPGHRTKEIDAALAKAANFLENMQRTDGSWYGCWGVCFTYAGWFGIKGLVAAGRTYNNCVAIRKACHFLLSKELPGGGWGESYLSCQNKVYTNLEGNRPHLVNTAWVLMALIEAGQGERDPAPLHRAARLLINSQLENGDFPQQEIMGVFNKNCMITYAAYRNIFPIWALGEYSHRVLTE

SEQ ID NO: 236 - protein, 764 aa, Cucurbita foetidissima
MWRLKVGAESVGEKDEKWVKSVSNHLGRQVWEFCADADAVTPHQSLQIHNARNHFHQNRFRRKQSSDLFLAIQYEKEIAKGVKVGAVKVKEGEEVGKEAVKSTLERALSFYSAVQTSDGNWASDLGGPMFLLPGLVIALYVTGVLNSVLSKHHRLEMCRYLYNHQNEDGGWGLHIEGTSTMFGSALNYVALRLLGEDADGGDGGAMTKARAWILERGGATAITSWGKLWLSVLGVYEWSGNNPLPPEFWLLPYSLPFHPGRMWCHCRMVYLPMSYLYGKRFVGPITPKVLSLRQELYTVPYHEIDWNKSRNTCAKEDLYYPHPKMQDILWGSIYHVYEPLFTRWPGKRLREKALQTAMKHIHYEDENSRYICLGPVNKVLNMLCCWVEDPYSDAFKLHLQRVHDYLWVAEDGMRMQGYNGSQLWDTAFSIQAIVATKLVDSYGPTLRKAHDFVKDSQIQEDCPGDPNVWFRHIHKGAWPFSTRDHGWLISDCTAEGLKASLMLSKLPSTMVGEPLEKSRLCDAVNVLLSLQNDNGGFASYELTRSYPWLELINPAETFGDIVIDYPYVECTAATMEALTLFKKLHPGHRTKEIDTAIAKAANFLEKMQRTDGSWYGCWGVCFTYAGWFGIKGLVAAGRTYNSCVAIRKACEFLLSKELPGGGWGESYLSCQNKVYTNLEGNKPHLVNTAWVLMALIEAGQGERDPAPLHRAARLLMNSQLENGDFLQQEIMGVFNKNCMITYAAYRNIFPIWALGEYCHRVLTE

SEQ ID NO: 237 - protein, 765 aa, Cucumis melo
MWQLKVGADTVPSDPSNAGRWLSTLNNHVGRQVWHFHPELGSPEDLQQIQNARQHFYDHRFEKKHSSDILMRMQFAKENSSFVNLPQIKVKEKEDVVEEAVTQTLRRAMNFYSTIQADDGHWPGDYGGPMFLLPGLVITLSITGALNAVLSTEHQREICRYLYNHQNRDGGWGLHIEGPSTMFGSVLSYVTLRLLGEEAEDGQGGVENARKWILDHGGATAITSWGKMWLSVLGVYEWAGNNPLPPELWLLPYLLPFHPGRMWCHCRMVYLPMCYLYGKRFVGPITPIIRSLRKELYLVPYHEIDWNEARNQCAKEDLYYPHPLVQDVLWASLHHVYEPLFMRWPAKRLREKALRTVMQHIHYEDENTRYICIGPVNKVLNMLCCWVEDPHSEAFKLHIPRIYDYLWLAEDGMKMQGYNGSQLWDTAFAVQAIMSTKLVEEYGTTLRKAHKYIKDSQVLEDCPGDLQSWYRHISKGAWPFSTADHGWPISDCTAEGLKAVVLLSKLPSEIVGKPVDEERMYDAVNVILSLQNTDGGFATYELTRSYRWLELMNPAETFGDIVIDYPYVECTSAAIQALAAFRKLYPGHRSNEIGNCIAKAADFIESIQATDGSWYGSWGVCFTYGGWFGIKGLVAAGRRYENSSSLRKACDYLLSKELPAGGWGESYLSCQDKVYTNIKDDRPHLVNTAWAMLSLIDAGQAERDPTPLHRAARILINSQMEDGDFPQEDIMGVFNKNCMISYSAYRNIFPIWALGAYRCRVLLAS

SEQ ID NO: 238 - protein, 765 aa, Cucumis metuliferus
MGEMWKLKFSKGWETSENDHVGRQYWEFDTNLTPSEEEKAQIQKFYNEFYNYRFQAKHSSDLLMRFQLRKENNGGEVKLPTQIKITGEEEINEEAIEKTLRRGIRFYSTLQTQDGFWPGDYGGPLFLLPALVIGLSVTKALDTAISVHHRHEMCRYLYNHQNEDGGWGLHIEGNSTMLCTALSYVSLRLLGEKMDGRDGVLLKARRWILDRGGATSIPSWGKTWLSVLGVYEWEGNNPLPPEIWLLPYSLPLHPGRMWCHSRMVYLPMSYLYGKRFVGPISPIIISLRRELYTCSYHTIDWNLSRNLCAKEDLYTPHSKIQNILWNSIHKFGEPLLKKWPLSKVRQKALDFVIQHIHYEDENTHYLCLGPISKVLNMVCCWAEDPNSEAFRRHIPRIKDYLWLAEDGMKMQGYNGSQLWDVVFAVQAILATDLVDEYGSVLKKAHNFIKNSQMKRNGIKDQNNPSVWYRHMSKGGWPFSTPDNAWPVSDCTAEALKAAILLSQMPTTMVGEPIDVHNLYDAVNLILSLQNSNGGFASYELTRSYPWLEMLNPAEIFGDVMIDYQYVECTSAAIQGLKAFMKLHPGYRKKDIQTCISKAAHFIETIQLPDGSWYGSWGICYTYGTWFGIKGLVACGRTYANSKCIRKATQFLLSKQLKSGGWGESYLSAHHKVYADLKDGKSHIVNTSWALLALIQADQAQRDPSPLHRAATVLINSQMDDGDFPQQEIMGVFNKSCMISYAAYRNIFPIWALGEYRIRVLQLPEN

SEQ ID NO: 239 - protein, 766 aa, Cucurbita pepo
MWRLKIGADTVPSDPSNAGGWLSTLSNHLGRQVWEFCAELGSPEDLQQIQQARQRFSDHRFEKKHSADLLMRMQFAKENSSFVNLPQVKVKDKEEVSEEAVTRTLRRAINFYSTIQADDGNWASDLGGPMFLLPGLVIALYVTGVLNSVLSTEHQREICRYLYNHQNRDGGWGLHIEGPSTMFGSVLNYVTLRLLGEEAEDGQGAVDKARKWILDHGGAAAITSWGKMWLSVLGVYEWAGNNPLPPELWLLPYLLPCHPGRMWCHCRMVYLPMCYLYGKRFVGPITPIIRSLRKELYLVPYHEVDWNKARNQCAKEDLYYPHPLVQDILWASLHHVYEPLFMHWPAKRLREKALQSVMQHIHYEDENSRYICLGPVNKVLNMLCCWAEDPHSEAFKLHIPRIYDYLWIAEDGMRMQGYNGSQLWDTAFSVQAIISTELAEEYETTLRKAHKYIKDSQVLEDCPGDPNVWFRHIHKGAWPFSTRDHGWLISDCTAEGLKASLMLSKLPSKIVGEPLEKQQLYNAVNVLLSLQNENGGFASYELTRSYPWLELINPAETFGDIVIDYPYVECSSAAIQALAAFKKLYPGHRRDEINNCIAKAADFIESIQATDGSWYGSWGVCFTYAGWFGIKGLVAAGRTYNNCSSLRKACDFLLSKELAAGGWGESYLSCQNKVYTNIKDDRPHIVNTGWAMLSLIDAGQSERDPTPLHRAARVLINSQMEDGDFPQEEIMGVFNKNCMITYAAYRNIFPIWALGEYRSRVLKLLK

SEQ ID NO: 240 - protein, 762 aa, Cucurbita pepo
MWRLKIADGGNDPYIYSTNDFIGRQTWEFDPEAGTPEERQEVEEARHHFYRNRYKVKPSADCLWRMQFLREKKFKQEIGAVKIKEGEEISQDKARIALRRAVHFYSALQASDGHWPAENAGPLFFLPPLVMCLYITGHLDQVFPEEHKKEILRYIYCHQNEDGGWGLHIEGHSTMFCTALSYICMRILGEGPDGGLNNACARGRKWILDHGSVTYIPSWGKTWLSILGVYDWAGSNPMPPEFWLLPSFLPMHPAKMWCYCRMVYMPMSYLYGKRFVCQITPLIQELRLELHAQPFDEINWKKTRHLCTKEDVYYPHPLMQDLLWDSLYICTEPLLTRWPFNKLVREKALQVTMKHIHYEDDNSRYITIGCVEKVLCMLACWVEDPDGDYFKKHLARIPDYIWVAEDGMKMQSFGSQEWDTGFAIQALLAADMADEIGPVLARGHDFIKKSQVKDNPSGNFKTMHRHISKGSWTFSDQDHGWQVSDCTAEALKCCLLFSLMRPEIVGDKMEAQRLYDSVNVLLSLQSKNGGLAAWEPATGQKWLEMLNPTEFFADIVIEHEYVECTASAIQALILFKKLHPGHRTKEIDNFIQNAVRYLQDIQMPDGSWYGNWGVCFTYGCWFALGGLVAAAKTFNNCAAIRKGVHFLLNIQMPDGGWGESYHCCPSKKYVPLEGKRSNLVHTAWAMMALIHSGQAERDPTPLHRAAKLLINSQTEDGDFPQQEITGVFMKNCMLHYAAYRNIYPLWALAEYSKRVKLASTSP

SEQ ID NO: 241 - protein, 762 aa, Cucurbita pepo
MWRLKVADGGNDPYIYSMNNFVGRQIWEFDPDAGSPDERAEVERVRNEFTKNRLKGFPSADLLWRLQLLREKNFKQSIPPVKVEDGEEITYEMASDAMKRGAYFLEAIQASDGHWPSETSGPLFYLCPLLICMYIMGFMDSAFSPEHKKEMMRYLYNHQNEDGGWGLHVGGHSNMFCTTFNYISLRLLGEEPDVEAVAKGRIWIRDHGGVTSILSWGKTWLSILNLFDWSASNPMPPEYWMFPTWVPIHPSNMMCYTRITYMPMSYLYGKRFQAPLTPLVLQLRDELHTQAYEKINWRKVRHMCATEDLYFPHPFVQDLLWDTLYMLSEPLMTRWPFNKLIRQKALDETMRHIHYEDENSRYITIGCVEKPLCMLACWVEDPNSEYVKKHFARIPDYLWMAEDGMKMQSFGSQSWDAALAMQALLACNITHDIGSALNNGHEFIKNSQVRNNPPGDYKSMFRYMSKGSWTFSDCDHGWQVSDCTAENLKCCLLLSLLPPEIVGEKMEPQRFYDAVNVILNMQSKNGGLPAWEPASSYYWMEWLNPVEFLEDLIIEHQHVECTSSALQAILLFRKQYPEHRKKEINNFINKAVQFLQDIQLPDGSWYGNWGICYTYGTWFALKALSMAGKTYENCEALRKGANFLIKIQNPEGGFGESYLSCPYKRYIPLDGKRSNLVQTAWGMMGLIAAGQADVDPGPIHRAAKLLINSQTEDGDFPQEEITGEFFKNCTLHFAAFREVFPVMALGEYCNKVPLPSKKNTIN

SEQ ID NO: 242 - protein, 759 aa, Cucurbita pepo
MWRLKVADGGNDPYIYSMSNHLGRQVWEFCADAGSPDERAEVERVRNEFTKNRLKGFPSADLLWRLQLLREKNFKQSIPPVKVEDGEEITYEMASDAMKRGAYFLEAIQASDGNWASDLGGPMFLLPGLVIALYVTGVLNSAFSPEHKKEMMRYLYNHQNEDGGWGLHVGGHSNMFCTTFNYISLRLLGEEPDVEAVAKGRIWIRDHGGVTSILSWGKTWLSILNLFDWSASNPMPPEYWMFPTWVPIHPSNMMCYTRITYMPMSYLYGKRFQAPLTPLVLQLRDELHTQAYEKINWRKVRHMCATEDLYFPHPFVQDLLWDTLYMLSEPLMTRWPFNKLIRQKALDETMRHIHYEDENSRYICLGPVEKPLCMLACWVEDPNSEYVKKHFARIPDYLWMAEDGMRMQGYNGSQLWDTAFSQALLACNITHDIGSALNNGHEFIKNSQVRNNPPGDPNVWFRHIHKGAWPFSTRDHGWLISDCTAEGLKASLMLSKLPSKIVGEPLEKYDAVNVLLSLQNENGGFASYELTRSYPWLELINPAETFGDIVIDYQHVECTSSALQAILLFRKQYPEHRKKEINNFINKAVQFLQDIQLPDGSWYGNWGICYTYAGWFGIKGLVAAGRTYNNCEALRKGANFLIKIQNPEGGFGESYLSCPYKRYIPLDGKRSNLVQTAWGMMGLIAAGQADVDPGPIHRAAKLLINSQTEDGDFPQEEIMGVFNKNCMITYAAFREVFPVMALGEYCNKVPLPSKKNTIN

SEQ ID NO: 243 - protein, 785 aa, Cucumis sativus
MWRLKVGKESVGEKEEKWIKSISNHLGRQVWEFCAENDDDDDDEAVIHVVANSSKHLLQQQRRQSSFENARKQFRNNRFHRKQSSDLFLTIQYEKEIARNGAKNGGNTKVKEGEDVKKEAVNNTLERALSFYSAIQTSDGNWASDLGGPMFLLPGLVIALYVTGVLNSVLSKHHRQEMCRYIYNHQNEDGGWGLHIEGSSTMFGSALNYVALRLLGEDANGGECGAMTKARSWILERGGATAITSWGKLWLSVLGVYEWSGNNPLPPEFWLLPYSLPFHPGRMWCHCRMVYLPMSYLYGKRFVGPITHMVLSLRKELYTIPYHEIDWNRSRNTCAQEDLYYPHPKMQDILWGSIYHVYEPLFNGWPGRRLREKAMKIAMEHIHYEDENSRYICLGPVNKVLNMLCCWVEDPYSDAFKFHLQRIPDYLWLAEDGMRMQGYNGSQLWDTAFSIQAILSTKLIDTFGSTLRKAHHFVKHSQIQEDCPGDPNVWFRHIHKGAWPFSTRDHGWLISDCTAEGLKASLMLSKLPSKIVGEPLEKNRLCDAVNVLLSLQNENGGFASYELTRSYPWLELINPAETFGDIVIDYSYVECTSATMEALALFKKLHPGHRTKEIDAALAKAANFLENMQRTDGSWYGCWGVCFTYAGWFGIKGLVAAGRTYNNCVAIRKACHFLLSKELPGGGWGESYLSCQNKVYTNLEGNRPHLVNTAWVLMALIEAGQGERDPAPLHRAARLLINSQLENGDFPQQEIMGVFNKNCMITYAAYRNIFPIWALGEYSHRVLTE

SEQ ID NO: 244 - protein, 758 aa, Vitis vinifera
MWRLKVADGGNDPYIDSTNNFVGRQIWEFDPDYGTPDERAEVEAARENFWKNRFQVKLSSDLLWRMQFARENPCVTNLPQIKVQDLEEVTEEVVTTTLRRGLNFYSTIQAHDGHWPGDCGGPMFLLPGLVITLYVTGALHVVLSIEQQREMCRYLCNHQNEDGGWGLHIEGPSTMFGTVLNYVTLRLLGEADFGAKGAMEKGQKWILDHGGATAITSWGKMWLSVLGAYEWFGTNPLPPEMWLCPYILPVHPGRMWCHCRMVYLPMSYLYGKKFVGPITSTIISLRKELYIVPYHEVDWNQARNQCAKEDLYYPHPLVQDILWASLHKVLEPILGHWPGNNLREKALCTVMQHVHYEDENTRYICLGPVNKVLNMLCCWIEDPNSEAFKLHIPRIFDYLWIAEDGMKMQGYSGSQLWDTSFAVQAIISTNLGEEYGLTLRKAHEFIKNSQVLEDCPGDLKFWYRHISKGAWPFSTADQGWPISDCTAEGLKAVLLLSKLPVETVGEPLDMKHLSDAVNVILSLQNADGGFATYELTRSYRWVELINPAETFGDIVIDYPYVECTSAAIQALTSFKKLYPEHRRHEIENCISKAAKFIEEIQAPDGSWYGCWGVCFTYGGWFGITGLIAAGNTYSNCPCIRKACDYLLSKELASGGWGESYLSCQNKVYTNLPGDKPHIVNTAWAMLALIEAGQAGRDPNPLHRAARILINSQMKNGDFPQEEIMGVFNKNCMINYSAYRNIFPIWALGEHRSRVLHSS

SEQ ID NO: 245 - protein, 786 aa, Gynostemma cardiospermum
MGNIKERKGKDRERQREMWKLKIGGESVGKNNEEKWLKSISNHLGRQVWEFCPKLETETETETESQIENARNTFHLNRFHKKQSSDLFITLQYGNEIAKIEGVKIKEKEEVREEAVKTTLERALNFYSAIQTSDGHWASDLGGPMFLLPGLVITLYVTGVLNSVLSKHHRQEICRYLYNHQNEDGGWGLHIEGPSTMFGSVLNYVALRLLAQDSEYDSILKGRRWILDHGGATGITSWGKLWLSVLGVYEWCGNNPLPPEFWILPYFLPFHPGRMWCHCRMVYLPMSYLYGKRFVGPITPTVLSLRKELYTVPYHEIDWNKSRNTCAKEDLYYPHPKIQDILWASLHHVYEPFFTRWPGKRLRDKALHAAMQHIHYEDENTRYICLGPVNKVLNMLCCWVEDPHSDAFKFHLQRVYDYLWVAEDGMKMQGYNGSQLWDTAFSVQAIISTKLTENFGPTLRKAHNFIKLSQIQQDCPGDPNIWYRHIHKGAWPFSTADHGWLISDCTAEGLKASLLLSKVSSNTVGEPLERNRLFDAVNVLLSLQNKNGGIASYELTRSYPWLELINPAETFGDIVIDYPYVECTSATIEALALFKKLYPGHRTKEIDNVIAKAAKFLEDMQREDGSWYGCWGVCFTYAGWFGIKGLVAAGRQYNNSPTIRKACNFILSKELPGGVGGWGESYLSCQNKVYTNLDGNRPHLVNTSWALMALIEAGQADRDPTPLHRAARLLINSQLENGDFPQQEIMGVFNKNCMITYAAYRNIFPIWALGEYCHRVLNQHRSSPLF

SEQ ID NO: 246 - protein, 769 aa, Gynostemma cardiospermum
MWKLKIGGESVGKNNEEKWLKSISNHLGRQVWEFCPKLETETETETESQIENARNTFHLNRFHKKQSSDLFITLQYGNEIAKIEGVKIKEKEEVREEAVKTTLERALNFYSAIQTSDGHWASDLGGPMFLLPGLVITLYVTGVLNSVLSKHHRQEICRYLYNHQNEDGGWGLHIEGPSTMFGSVLNYVALRLLAQDSEYDSILKGRRWILDHGGATGITSWGKLWLSVLGVYEWCGNNPLPPEFWILPYFLPFHPGRMWCHCRMVYLPMSYLYGKRFVGPITPTVLSLRKELYTVPYHEIDWNKSRNTCAKEDLYYPHPKIQDILWASLHHVYEPFFTRWPGKRLRDKALHAAMQHIHYEDENTRYICLGPVNKVLNMLCCWVEDPHSDAFKFHLQRVYDYLWVAEDGMKMQGYNGSQLWDTAFSVQAIISTKLTENFGPTLRKAHNFIKLSQIQQDCPGDPNIWYRHIHKGAWPFSTADHGWLISDCTAEGLKASLLLSKVSSNTVGEPLERNRLFDAVNVLLSLQNKNGGIASYELTRSYPWLELINPAETFGDIVIDYPYVECTSATIEALALFKKLYPGHRTKEIDNVIAKAAKFLEDMQREDGSWYGCWGVCFTYAGWFGIKGLVAAGRQYNNSPTIRKACNFILSKELPGGVGGWGESYLSCQNKVYTNLDGNRPHLVNTSWALMALIEAGQADRDPTPLHRAARLLINSQLENGDFPQQEIMGVFNKNCMITYAAYRNIFPIWALGEYCHRVLNQHRSSPLF

SEQ ID NO: 247 - protein, 759 aa, Siraitia grosvenorii
MWRLKVGAESVGENDEKWLKSISNHLGRQVWEFCPDAGTQQQLLQVHKARKAFHDDRFHRKQSSDLFITIQYGKEVENGGKTAGVKLKEGEEVRKEAVESSLERALSFYSSIQTSDGNWASDLGGPMFLLPGLVIALYVTGVLNSVLSKHHRQEMCRYVYNHQNEDGGWGLHIEGPSTMFGSALNYVALRLLGEDANAGAMPKARAWILDHGGATGITSWGKLWLSVLGVYEWSGNNPLPPEFWLFPYFLPFHPGRMWCHCRMVYLPMSYLYGKRFVGPITPIVLSLRKELYAVPYHEIDWNKSRNTCAKEDLYYPHPKMQDILWGSLHHVYEPLFTRWPAKRLREKALQTAMQHIHYEDENTRYICLGPVNKVLNLLCCWVEDPYSDAFKLHLQRVHDYLWVAEDGMKMQGYNGSQLWDTAFSIQAIVSTKLVDNYGPTLRKAHDFVKSSQIQQDCPGDPNVWYRHIHKGAWPFSTRDHGWLISDCTAEGLKAALMLSKLPSETVGESLERNRLCDAVNVLLSLQNDNGGFASYELTRSYPWLELINPAETFGDIVIDYPYVECTSATMEALTLFKKLHPGHRTKEIDTAIVRAANFLENMQRTDGSWYGCWGVCFTYAGWFGIKGLVAAGRTYNNCLAIRKACDFLLSKELPGGGWGESYLSCQNKVYTNLEGNRPHLVNTAWVLMALIEAGQAERDPTPLHRAARLLINSQLENGDFPQQEIMGVFNKNCMITYAAYRNIFPIWALGEYCHRVLTE

SEQ ID NO: 248 - protein, 765 aa, Lagenaria siceraria
MWRLKVGADTVPADPSNAGGWLSTLSNHLGRQVWEFCAELGSPEDLQQIQHARQRFSDHRFEKKHSADLLMRMQFAKENSSFVNLPQIKVKDKEDVIEEAVTRTLRRAINFYSTIQADDGNWASDLGGPMFLLPGLVIALYVTGVLNSVLSTEHQREICRYLYNHQNRDGGWGLHIEGPSTMFGSVLNYVTLRLLGEEAEDGQGGVDKARKWILDHGGATAITSWGKMWLSVLGIYEWAGNNPLPPELWLLPYLLPCHPGRMWCHCRMVYLPMCYLYGKRFVGPITPIIRSLRKELYLVPYHEVDWNEARNQCAKEDLYYPHPLVQDVLWASLHHVYEPLFMRWPAKRLREKALRSVMQHIHYEDENSRYICLGPVNKVLNMLCCWAEDPHSEAFKLHIPRIYDYLWIAEDGMRMQGYNGSQLWDTAFSVQAIISTKLAEEYGTTLRKAHKYIKDSQVLEDCPGDPNVWFRHIHKGAWPFSTRDHGWLISDCTAEGLKASLMLSKLPSKIVGEPLEKERIYDAVNVLLSLQNENGGFASYELTRSYPWLELINPAETFGDIVIDYPYVECTSAAIQALAAFKKLYPGHRSNEIGNCIAKAADFIESIQATDGSWYGSWGVCFTYAGWFGIKGLVAAGRTYNNCSSLRKACDFLLSKELAAGGWGESYLSCQDKVYTNIKDDRPHIVNTGWATLSLIDAGQAERDPTPLHRAARVLINSQMDDGDFPQEEIMGVFNKNCMITYAAYRNIFPIWALGEYRCRVLQAP

SEQ ID NO: 249 - protein, 758 aa, Linum usitatissimum
MWRLKIAEGGNPWLRTTNDHVGRQVWEFDPELGSPEELSAIELARRDFTKNRFEHKHSADLLMRIQFSKENPLERVLPQVKLKEKEDVTKEAVKSTLERALSFYSAVQTSDGNWASDLGGPMFLLPGLVIALSVTGAMNAVLSEQHKSEMRRYLYNHQNEDGGWGLHIEGPSTMFGSVLSYVTLRLLGEGANDGEGAMEKGRDWIVNHGGATAITSWGKMWLSVLGVFEWSGNNPLPPEIWLLPYMLPIHPGRMWCHCRMVYLPMSYLYGKRFVGPITPTVLSLRKELFSTPYHEIDWNRARNECAKEDLYYPHPLIQDLLWGSLHNFVEPILMAWPGKKLREKALRTTLEHIHYEDENTRYICLGPVNKVLNLLCCWVEDPYSDAFKLHLQRVHDYLWVAEDGMKMQGYNGSQLWDTAFSIQAILSTNLIEEYASTLKKAHAFVKDSQIQEDCPGDPNVWFRHIHKGAWPFSTRDHGWLISDCTAEGLKASLMLSKLPSTMVGEPLEANRLCDAVNVLLSLQNDNGGFASYELTRSYPWLELINPAETFGDIVIDYPYVECTSATMEALTLFKKLHPGHRTKEIDTCIKKAVAFLEKMQRADGSWYGCWGVCFTYAGWFGIKGLVAAGRTYNSCLAIRKACEFLLSKELPGGGWGESYLSCQNKVYTNLEGNKPHLVNTAWVLMALIEAGQAERDPAPLHRAARFLINSQMENGDFPQQEIMGVFNRNCMITYSAYRDIFPIWALGEYRTKVLHASS

SEQ ID NO: 250 - protein, 759 aa, Linum usitatissimum
MWRLKISEGGNPWLRTTNNHVGRQVWEFDPELGSPEELSAIELARRDFTKNRFEQKHSADLLMRIQFSKENPLERVLPQVKLREKEDVTKEAVKSTLERALSFYSAVQTSDGNWASDLGGPMFLLPGLVIALSVTGAMNAVLSEQHKSEMCRYLYNHQNEDGGWGLHIEGPSTMFGSVLSYVTLRLLGEGPNDGEGAMGKGRDWILNHGGATAITSWGKLWLSVLGVFEWSGNNPLPPEIWLLPYMLPIHPGRMWCHCRMVYLPMSYLYGKRFVGPITPTVLSLRKELFSTPYHEIDWNRARNECAKEDLYYPHPLIQDLLWGSLHNFVEPILMAWPGKKLREKALRTTLEHIHYEDENTRYICLGPVNKVLNLLCCWVEDPYSDAFKLHLQRVHDYLWVAEDGMKMQGYNGSQLWDTAFSIQAILSTNLVEEYASTLKKAHTYVKDSQIQEDCPGDPNVWFRHIHKGAWPFSTRDHGWLISDCTAEGLKASLMLSKLPSTMVGEPLEANRLCDAVNVLLSLQNDNGGFASYELTRSYPWLELINPAETFGDIVIDYPYVECTSATMEALTLFKKLHPGHRTKEIDTCIKKAVAFLEKMQRADGSWYGCWGVCFTYAGWFGIKGLVAAGRTYNSCLAIRKACEFLLSKELPGGGWGESYLSCQNKVYTNLEGNKPHLVNTAWVLMALIEAGQAERDPAPLHRAARFLINSQMENGDFPQQDIMGVFNRNCMITYAAYRDIFPIWALGEYRTKVLHASPS

SEQ ID NO: 251 - protein, 762 aa, Momordica charantia
MWRLKVGAESVGENDEKWVKSISNHLGRQVWEFCPDAGTPQQLLQIEKARKAFQDNRFHRKQTSDLLVSIQCEKGTTNGARVPGTKLKEGEEVRKEAVKSTLERALSFYSSIQTSDGNWASDLGGPMFLLPGLVIALCVTGALNSVLSKHHRQEMCRYLYNHQNEDGGWGLHIESPSTMFGSALNYVALRLLGEDADGGEGRAMTKARAWILGHGGATAITSWGKLWLSVLGVYEWSGNNPLPPEFWLLPYFLPFHPGRMWCHCRMVYLPMSYLYGKRFVGPITPVVLSLRKELYTVPYHEIDWNKSRNTCAKEDLYYPHSKMQDILWGSIHHMYEPLFTHWPAKRLREKALKTAMQHIHYEDENTRYICLGPVNKVLNMLCCWVEDPYSEAFKLHLQRVHDYLWVAEDGMKMQGYNGSQLWDTAFSVQAIISTKLVDNYGPTLRKAHDYVKNSQIQQDCPGEPNVWFRHIHKGAWPFSTRDHGWLISDCTAEGLKASLMLSKLPSETVGEPLERNRLCDAVNVLLSLQNDNGGFASYELTRSYPWLELINPAETFGDIVIDYPYVECTSATMEALALFKKLHPGHRTKEIDTAIARAADFLENMQRTDGSWYGCWGVCFTYAGWFGIKGLVAAGRAYSNCLAIRKACDFLLSKELPGGGWGESYLSCQNKVYTNLEGNRPHLVNTAWVLMALIEAGQGERDPAPLHRAARLLINSQLENGDFPQEEIMGVFNKNCMITYAAYRNIFPIWALGEYCHRVLTE

SEQ ID NO: 252 - protein, 703 aa, Momordica charantia
MGSNNFVGRKMWRLKLGEGANNPYLWSSNNFVGRQTWDFEADEGTPEERAQIEAARKTYFQNRFKVQCSNDLFWKFQVFAFYITGHLGTIFPEEHQKELLRYAYCHQNEDGGWGLYIMGESCMLCTVLNYIQLRLLGEEPDTDACNRARKWILDHGGALYIPSWGKIWLSILGVYEWDGANPMPPEFWLFGNALPLKPGHLLGYSRLTLLPMSYLYGKRFVGTLTPLILQLRQEIYTQPYSNIKWSPARHYCAKEDKCFERSWIQKLAWDAVHYLGEPLLGSWAFKSVRNRALQIARFHIDYEDQNSHYITIGCVEKPLCTLATWVDDPNGQAYKKHLARVKDYLWIGEDGMKIQSFGSQSWDVAFAIQAILATNFHREFSDTLKKGHDFIKKSQIRENPSGDFQSMYRHISKGSWSFSDQDHGWQLSDCTAENLTCCLILSTMPPDMVGDPMKPQCFFDAVNIILSLQAKNGGVSAWEPTGIVSSWFERLNPVEFLEYSILELEYVECTSSSLQALVLFKKLFPNHRKKEIETFITKGVNYIKEMQKDDGSWYGNWGICHLYATYFAIKGLVAVGYSYDSCSTIRRGVDFLLKIQCPDGGWGESHVSVTKKVYTPLQHNASNLVQTSFALMALIHAQQANRDPTPVHRAAKLLINSQLEDGDYPQQEITGAFMGNCMLHYPLYKNVFPLWALADYCNLVPLP

SEQ ID NO: 253 - protein, 756 aa, Pisum sativum
MWKLKVAEGGTPWLRTLNNHVGRQVWEFDPHSGSPQDLDDIETARRNFHDNRFTHKHSDDLLMRLQFAKENPMNEVLPKVKVKDVEDVTEEAVATTLRRGLNFYSTIQSHDGHWPGDLGGPMFLMPGLVITLSVTGALNAVLTDEHRKEMRRYLYNHQNKDGGWGLHIEGPSTMFGSVLCYVTLRLLGEGPNDGEGDMERGRDWILEHGGATYITSWGKMWLSVLGVFEWSGNNPMPPEIWLLPYALPVHPGRMWCHCRMVYLPMSYLYGKRFVGPITPTVLSLRKELFTVPYHDIDWNQARNLCAKEDLYYPHPLVQDILWATLHKFVEPVFMNWPGKKLREKAIKTAIEHIHYEDENTRYICIGPVNKVLNMLCCWVEDPNSEAFKLHLPRIYDYLWVAEDGMKMQGYNGSQLWDTAFAAQAIISTNLIDEFGPTLKKAHAFIKNSQVSEDCPGDLSKWYRHISKGAWPFSTADHGWPISDCTAEGLKAVLLLSKIAPEIVGEPLDSKRLYDAVNVILSLQNENGGLATYELTRSYTWLEIINPAETFGDIVIDCPYVECTSAAIQALATFGKLYPGHRREEIQCCIEKAVAFIEKIQASDGSWYGSWGVCFTYATWFGIKGLIAAGKNFSNCLSIRKACEFLLSKQLPSGGWAESYLSCQNKVYSNLEGNRSHVVNTGWAMLALIEAEQAKRDPTPLHRAAVCLINSQLENGDFPQEEIMGVFNKNCMITYAAYRCIFPIWALGEYRRVLQAC

SEQ ID NO: 254 - protein, 764 aa, Cucurbita pepo
MWRLKVGAESVGEEDEKWVKSVSNHLGRQVWEFCADAAADTPHQLLQIQNARNHFHHNRFHRKQSSDLFLAIQYEKEIAKGAKGGAVKVKEGEEVGKEAVKSTLERALGFYSAVQTRDGNWASDLGGPLFLLPGLVIALHVTGVLNSVLSKHHRVEMCRYLYNHQNEDGGWGLHIEGTSTMFGSALNYVALRLLGEDADGGDGGAMTKARAWILERGGATAITSWGKLWLSVLGVYEWSGNNPLPPEFWLLPYSLPFHPGRMWCHCRMVYLPMSYLYGKRFVGPITPKVLSLRQELYTIPYHEIDWNKSRNTCAKEDLYYPHPKMQDILWGSIYHVYEPLFTRWPGKRLREKALQAAMKHIHYEDENSRYICLGPVNKVLNMLCCWVEDPYSDAFKLHLQRVHDYLWVAEDGMRMQGYNGSQLWDTAFSIQAIVATKLVDSYAPTLRKAHDFVKDSQIQEDCPGDPNVWFRHIHKGAWPLSTRDHGWLISDCTAEGLKASLMLSKLPSTMVGEPLEKNRLCDAVNVLLSLQNDNGGFASYELTRSYPWLELINPAETFGDIVIDYPYVECTAATMEALTLFKKLHPGHRTKEIDTAIGKAANFLEKMQRADGSWYGCWGVCFTYAGWFGIKGLVAAGRTYNSCLAIRKACEFLLSKELPGGGWGESYLSCQNKVYTNLEGNKPHLVNTAWVLMALIEAGQGERDPAPLHRAARLLMNSQLENGDFVQQEIMGVFNKNCMITYAAYRNIFPIWALGEYCHRVLTE

SEQ ID NO: 255 - protein, 764 aa, Sechium edule
MWRLKVGAESVGEKDEKWVKSVSNHLGRQVWEFCADADAVTPHQSLQIHNARNHFHQNRFRRKQSSDLFLAIQYEKEIAKGVKVGAVKVKEGEEVGKEAVKSTLERALSFYSAVQTSDGNWASDLGGPMFLLPGLVIALYVTGVLNSVLSKHHRLEMCRYLYNHQNEDGGWGLHIEGSSTMFGSALNYVALRLLGEDVDGGDGGAMTKGRAWILDRGSATAITSWGKLWLSVLGVYEWSGNNPLPPEFWLLPYSLPFHPGRMWCHCRMVYLPMSYLYGKRFVGPITPIVLSLRKELYTVPYHEIDWNKSRNTCAKEDLYYPHPKVQDILWGTIHHVYEPLFSGWPCKRLREKALQTAMKHIHYEDENSNYICLGPVNKVLNMLCCWVEDPYSDAFKLHLQRIHDFLWVSEDGMKMQGYNGSQLWDTAFSIQAIASTKLVDTYGHSLRKAHNFVKNSQIQQDCPGDSNVWFRHIHKGAWPFSTRDHGWLISDCTAEGLKASLTLSKLPSQLVGEPLEKNRLYDAVNVLLSLQNENGGFASYELTRSYPWLELINPAETFGDIVIDYSYVECTAATMEALALFKKLHPGHRTKEIDTCIAKAANFLETMQRTDGSWYGCWGVCFTYAGWFGIKGLIAAGRTYKTCIAIRKACDFLLSKELPGGGWGESYLSCQNKVYTNLEGNRPHLVNTAWVLMALIEAGQAKRDQAPLHRAARLLINSQLENGDFPQQEIMGVFNKNCMITYAAYRNIFPIWALGEYYHRVLTK

SEQ ID NO: 256 - protein, 759 aa, Siraitia grosvenorii; identical to SEQ ID NO: 247

SEQ ID NO: 257 - protein, 759 aa, Siraitia grosvenorii; identical to SEQ ID NO: 247

SEQ ID NO: 258 - protein, 763 aa, Trichosanthes kirilowii
MWRLKVGGESVGEKEEKWVKSISNHLGRQVWEFCPHDGTPEQRLQVQKARDAFFRINRFRRKQSSDLFLAIQYEKEIANGATVGGIKLKEGDEVRKEAVKSTLERALNFYSAVQTTDGNWASDLGGPMFLLPGLVIALYVTGVLNSVLSKNHRQEMCRYLYNHQNEDGGWGLHIEGPSTMFGSALNYVALRLLGEDADGGDGGAMTKARAWILDRGGATAITSWGKLWLSVLGVYEWSGNNPLPPEFWLLPYFLPFHPGRMWCHCRMVYLPMSYLYGKRFVGPITPIVLSLRKELYTVPYHEVDWNKSRNTCAKEDLYYPHPKMQDILWGSIHHVYEPLFSRWPGKRLREKALQSAMQHIHYEDENTRYICLGPVNKVLNMLCCWVEDPYSDAFKLHLQRVHDYLWVSEDGMKMQGYNGSQLWDTAFSIQAIASTKLVDSYGPTLRKAHDFVKNSQIQQDCPGDSNVWFRHIHKGAWPFSTRDHGWLISDCTAEGLKASLMLSKLPSEIVGPSLEKNRLCDAVNVLLSLQNDNGGFASYELTRSYPWLELINPAETFGDIVIDYSYVECTSATMEALTLFKKLHPGHRTKEIDTAIGKAANFLEKMQRTDGSWYGCWGVCFTYAGWFGIKGLVAAGRTYNSCIAIRKACDFLLSKELPGGGWGESYLSCQNKVYTNLEGNRPHLVNTAWVLMALIEAGQAERDPAPLHRAARLLINSQLENGDFPQEEIMGVFNKNCMITYAAYRNIFPIWALGEYCHRVLTE

SEQ ID NO: 259 - protein, 775 aa, Trichosanthes kirilowii
MGRRERWGGRREIMWRLKVGGESVGEKEEKWVKSISNHLGRQVWEFCPHDGTPEQRLQVQKARDAFRINRFRRKQSSDLFLAIQYEKEIANGATVGGIKLKEGDEVRKEAVKSTLERALNFYSAVQTTDGNWASDLGGPMFLLPGLVIALYVTGVLNSVLSKNHRQEMCRYLYNHQNEDGGWGLHIEGPSTMFGSALNYVALRLLGEDADGGDGGAMTKARAWILDRGGATAITSWGKLWLSVLGVYEWSGNNPLPPEFWLLPYFLPFHPGRMWCHCRMVYLPMSYLYGKRFVGPITPIVLSLRKELYTVPYHEVDWNKSRNTCAKEDLYYPHPKMQDILWGSIHHVYEPLFSRWPGKRLREKALQSAMQHIHYEDENTRYICLGPVNKVLNMLCCWVEDPYSDAFKLHLQRVHDYLWVSEDGMKMQGYNGSQLWDTAFSIQAIASTKLVDSYGPTLRKAHDFVKNSQIQQDCPGDSNVWFRHIHKGAWPFSTRDHGWLISDCTAEGLKASLMLSKLPSEIVGPSLEKNRLCDAVNVLLSLQNDNGGFASYELTRSYPWLELINPAETFGDIVIDYSYVECTSATMEALTLFKKLHPGHRTKEIDTAIGKAANFLEKMQRTDGSWYGCWGVCFTYAGWFGIKGLVAAGRTYNSCIAIRKACDFLLSKELPGGGWGESYLSCQNKVYTNLEGNRPHLVNTAWVLMALIEAGQAERDPAPLHRAARLLINSQLENGDFPQEEIMGVFNKNCMITYAAYRNIFPIWALGEYCHRVLTE

SEQ ID NO: 260 - protein, 757 aa, Solanum tuberosum
MWKLKVAEGGSPWLRTLNGHIGRQVWEFDPNLGSPKDLEEIEKFRAEFYKNRFETKHSSDLLMRYQFSKENPVGTILPRVQVKDIGDITEDNVATTLRRAISFYSTLQAHDGHWAADCGGPMFLLPGLVIALSVTGALNAVLSEEHKREICRYLYNHQNCDGGWGLHIESHSTMFGSVLSYVTLRLLGEKANGGEGAMEKGRKWILDHGTATAITSWGKMWLSVLGLFDWSGNNPLPPEMWLLPYILPFHPGRMWCHCRMVYLPMSYLYGKRFVGPITPTVLSLRKELFTVPYHKINWNKARNECAKEDLYYPHPLLQDILWTSLDKLIEPLFMHWPGKKLREKALSTVMDHIHYEDENTRYICLGPVNKVLNMLCCWVEDSSSEAFKLHLPRLYDYLWIAEDGMKIQGYNGSQSWDTSFAIQAIISTNLVEEYGPTLRKAHKFMKNSQVLDDCPGNLDFWYRHISKGAWPFSTADHGWPISDCTAEGLKACLLLSKLPVEIVGEPLKANRLYDAVNVMLSLQNPDGGIGTYELSRSYPWLEIINPAETFGDIVIDYPYVECTSAIIQALAAFKKLYPGYRKEDVERCIEKGAAFIEKIQEADGSWYGCWGVCFTYGTWFGVKGLLDAGRNFNNSYNIRKACDFLLSKQVVSGGWGESYLSCQNKVYTNLKGNKSHSVCTAWAMLALIEAGQGERDPTPLHRAAKVLINSQLENGDFPQQEISGVFNKNCMISYSAYRNIFPIWALGQYQSQLLNPQ

SEQ ID NO: 261 - protein, 768 aa, Zea mays
MWKLKVAAEGGGGPLLRSTNRFVGRTVWEFEPDLGTPEQRAEVEKARRDFSDHRFQRRHSADVLMRMQMQQYSKGTPLKLDLPAVKKLGEDEDVTEEAVSTSLKRAINRVSALQAHDGHWPGDCSGPLFLLPGLIITLYVTGALNAVLSSEHQREIRRYLYNHQNEDGGWGLHMEGHSAMLGTTLNYVALRLIGEGPDSGGDDGAAMERGRNWILQRGGATYTTSWGKFWLTVLGVYDWSGNNPLPPEMWLLPYHLPFHPGRMWCHCRAVYLPMSYVYGKRFVGRITPLVLELRNELYGDPYSLIDWNKARNQCAKEDLYYPHSFLQDVLWATLHKFVEPVMMHWPGIKFREIALRTAMRHIHYEDESTRYINLGPVNKVLNMLACWIEDPNSEAFKLHVPRIYDYLWLAEDGMKMKGYNGSQLWDAGLTVLAIVNTDLIEEFGPTLKLAHAFVKNSQIIDNCLEDLNQWYRHMSKGGWPFSTADHGWCVSDCTATGLEATLLLSTISPQIVGEAMEVGRVYDGVNCLISLMNNNGGFATFELTRSYAWLEHINPSETFGGIMIDYPYVECTSSSIQALALFKKLYPRHRTEEIDSCISKGANFIESMQRNDGSWYGSWGVCFTYATWFAVFGLACAGRTFEDSPAIKKACEFLLSKELPSGGWGESYLSCQDKVYTNLEGMRPHAVNTSWAMLALIRVGQAERDPAPLHRAARVLINLQSEDGEFPQQEIIGVFNQNCMIGYSQYRNIFPIWALGEYRTKVHVPRKK

SEQ ID NO: 262 - protein, 757 aa, Tarenaya hassleriana
MWRLKFAEGGSPWLRTTNNHVGRQVWEFDPRLGTPEELAEIEEARKSFAENRFVHKHSSDLLMRLQFSRENPVRQVLPQVEVKDTDDISKEAVKSTLERALSFYSAVQTSDGNWASDLGGPMFLLPGLVIALSITGALNAVLSEQHKQEMCRYLYNHQNEDGGWGLHIEGPSTMFGSVLNYVTMRLLGEGPNDGDGAMEKGRDWILNHGGATYITSWGKMWLTVLGVFEWSGNNPLPPEIWLLPYILPIHPGRMWCHCRMVYLPMSYLYGKRFVGPITPTVLSLRKELFTVPYHEVDWNKARNLCAKEDLYYPHPVVQDILWASLHKVVEPILMRWPVTKLREKALRTAIEHIHYEDENTRYICLGPVNKVLNLLCCWVEDPYSDAFKLHLQRVHDYLWVAEDGMKMQGYNGSQLWDTAFSIQAIFATNFVEEYGDVLKKANSYIKDSQIQEDCPGDPNVWFRHIHKGAWPFSTRDHGWLISDCTAEGLKASLMLSKLPSTMVGEPLEANRLCDAVNVLLSLQNDNGGFASYELTRSYPWLELINPAETFGDIVIDYPYVECTSATMEALTLFKKLHPGHRTKEIDQCIKKAAKFLEKMQRADGSWYGCWGVCFTYAGWFGIKGLVAAGRTYNSCLAIRKACEFLLSKELPGGGWGESYLSCQNKVYTNLEGNKPHLVNTAWVLMALIEAGQHERDPKPLHRAARYLINSQLENGDFPQQEIMGVFNKNCMITYAAYRNIFPIWALGEYRSQVLQAA

SEQ ID NO: 263 - protein, 663 aa, Gossypium hirsutum
MDRQSFRDNRFHRKQSSDLFLAIQFAEEKQSVTNLPQTKLEEFEDVKKEAVKSTLERALSFYSAVQTSDGNWASDLGGPMFLLPGLVITLYVTGALNTVLSKEHQYEICRYLYNHQNRDGGWGLHIEGPSTMFGTVLNYVSLRLLGEGAEGGEGAIEKARRMWCHCRMVYLPMSFLYGKKFVGPITPTILSLRKELYTVPYHEVDWNKARNACAKEDLYYPHPLVQDILWASLHYLYEPMLKYWPCKSLREKALQIVMQHIHYEDENTRYICLGPVNKVLNMLCCWVEDPYSESFKLHLPRILDYLWIAEDGMKMQGYNGSQLWDTAFAIQAIISTGLADEYGSVLRKAHDFLKDSQIQEDCPGDPNVWFRHIHKGAWPFSTRDHGWLISDCTAEGLKASLMLSKLPSTMVGEPLEVNRLCDAVNVLLSLQNDNGGFASYELTRSYPWLELINPAETFGDIVIDYPYVECTSATMEALTLFKKLHPGHRTKEIDIGRAVEFLEKMQRADGSWYGCWGVCFTYAGWFGIKGLVAAGRTYNSCLAIRKACEFLLSKELPGGGWGESYLSCQNKVYTNLEGNKPHLVNTAWVLMALIEAGQAERDPTPLHRAAKILINSQMEDGDFPQEEIMGVFNKNCMISYSAYRNIFPIWALGEYHCRVLQAP

SEQ ID NO: 264 - DNA, 1563 bp, Artificial Sequence
  Synthetic
atggaaatgtcctcaagtgtcgcagccacaatcagtatctggatggtcgtcgtatgtatcgtaggtgtaggttggagagtcgtaaattgggtttggttgctgccaaagaaattggaaaagagattgagagaacaaggtttggccggtaattcttacagattgttgttcggtgacttgaaggaaagagctgcaatggaagaacaagcaaattcaaagcctataaacttctcccatgacatcggtccaagagttttcccttcaatgtacaagaccatccaaaactacggtaaaaactcctacatgtggttaggtccataccctagagtccacatcatggatccacaacaattgaagaccgtttttactttggtctacgacattcaaaagccaaatttgaaccctttgattaaattcttgttagatggtatcgttacacatgaaggtgaaaagtgggctaagcacagaaagattattaacccagcattccatttggaaaagttgaaggatatgatacctgctttctttcactcatgtaatgaaatcgtcaacgaatgggaaagattgatttcaaaagaaggttcctgcgaattggatgtaatgccttatttgcaaaatttggccgctgacgccatttcaagaaccgcttttggttcttcatacgaagaaggtaaaatgatcttccaattgttgaaggaattgactgatttggttgtcaaggtagcttttggtgtttatattccaggttggagattcttgcctacaaagagtaacaacaaaatgaaggaaattaatagaaaaatcaagtctttgttgttgggtatcattaacaagagacaaaaggcaatggaagaaggtgaagccggtcaatctgatttgttgggtatattaatggaaagtaattctaacgaaatccaaggtgaaggtaataacaaggaagatggcatgtctattgaagacgtcatcgaagagtgtaaggtattttatataggtggtcaagaaactacagcaagattattgatctggactatgatattgttgtccagtcatacagaatggcaagaaagagccagaaccgaagtcttgaaggtatttggtaataagaaaccagatttcgacggtttgtcaagattgaaggtagttactatgatcttgaacgaagttttaagattgtacccacctgcttccatgttgacaagaatcatccaaaaggaaacaagagttggtaaattaaccttgccagcaggtgttatcttgataatgcctatcatcttgatacatagagatcacgacttgtggggtgaagatgctaacgagtttaaaccagaaagattcagtaaaggtgtttctaaggcagccaaagtccaaccagcctttttcccttttggttggggtcctagaatttgcatgggtcaaaacttcgctatgatcgaagctaagatggcattgagtttgatcttgcaaagattttctttcgaattgtcttcatcctacgttcatgcaccaactgtcgtcttcactacacaaccacaacacggtgcccacatcgttttgagaaagttataa

SEQ ID NO: 265 - DNA, 1422 bp, Artificial Sequence
  Synthetic
atgtggactgtcgtgctcggtttggcgacgctgtttgtcgcctactacatccattggattaacaaatggagagattccaagttcaacggagttctgccgccgggcaccatgggtttgccgctcatcggagagacgattcaactgagtcgacccagtgactccctcgacgttcaccctttcatccagaaaaaagttgaaagatacgggccgatcttcaaaacatgtctggccggaaggccggtggtggtgtcggcggacgcagagttcaacaactacataatgctgcaggaaggaagagcagtggaaatgtggtatttggatacgctctccaaatttttcggcctcgacaccgagtggctcaaagctctgggcctcatccacaagtacatcagaagcattactctcaatcacttcggcgccgaggccctgcgggagagatttcttccttttattgaagcatcctccatggaagcccttcactcctggtctactcaacctagcgtcgaagtcaaaaatgcctccgctctcatggtttttaggacctcggtgaataagatgttcggtgaggatgcgaagaagctatcgggaaatatccctgggaagttcacgaagcttctaggaggatttctcagtttaccactgaattttcccggcaccacctaccacaaatgcttgaaggatatgaaggaaatccagaagaagctaagagaggttgtagacgatagattggctaatgtgggccctgatgtggaagatttcttggggcaagcccttaaagataaggaatcagagaagttcatttcagaggagttcatcatccaactgttgttttctatcagttttgctagctttgagtccatctccaccactcttactttgattctcaagctccttgatgaacacccagaagtagtgaaagagttggaagctgaacacgaggcgattcgaaaagctagagcagatccagatggaccaattacttgggaagaatacaaatccatgacttttacattacaagtcatcaatgaaaccctaaggttggggagtgtcacacctgccttgttgaggaaaacagttaaagatcttcaagtaaaaggatacataatcccggaaggatggacaataatgcttgtcaccgcttcacgtcacagagacccaaaagtctataaggaccctcatatcttcaatccatggcgttggaaggacttggactcaattaccatccaaaagaacttcatgccttttgggggaggcttaaggcattgtgctggtgctgagtactctaaagtctacttgtgcaccttcttgcacatcctctgtaccaaataccgatggaccaaacttgggggaggaaggattgcaagagctcatatattgagttttgaagatgggttacatgtgaagttcacacccaaggaatga

SEQ ID NO: 266 - DNA, 2106 bp, Artificial Sequence
  Synthetic
atgaaggtgtcgccttttgagttcatgagtgccataattaaaggcagaatggacccgagcaattcatcttttgaatccacaggagaagtagcatctgtcatctttgagaaccgagaattggttgcgattttaaccacgtcaatagctgttatgattgggtgtttcgtggttcttatgtggcgtagggctggttccagaaaagtcaagaatgtcgaactacccaaaccactgatcgttcacgaaccagagcctgaagtagaagatggtaagaaaaaggtaagcatcttctttggtactcagacaggaactgccgagggcttcgcaaaagctttggcagatgaagctaaggcgcgctatgaaaaagccacttttagagttgtcgacctcgatgattacgcggctgacgatgaccaatatgaagagaaattaaaaaacgagtctttcgcagtatttctattggcaacatacggtgatggtgaaccaaccgataatgctgcaaggttctataagtggtttgccgaagggaaagagcgtggcgaatggttacaaaacttacattacgctgtttttggattgggtaatcggcagtatgaacattttaataaaattgcaaaggtggccgatgagcttttagaagctcaaggtgggaacagactcgtaaaagttggcctgggggatgacgatcaatgcatagaagacgatttctcagcttggagagaaagtttgtggcccgaacttgacatgctcttaagagatgaagatgatgctacaactgttacgaccccttacactgctgccgtcttggagtatcgagtggtgttccacgatagcgcagatgtcgctgcggaggacaagtcttggattaatgccaacggtcatgctgttcacgacgctcaacatcctttccgctctaatgtagttgtgagaaaagaactgcatacatccgcctctgatagaagttgttcgcatttagaatttaacatatcaggctctgcactaaattatgagactggagatcatgtaggtgtttactgcgaaaaccttacagaaaccgtagatgaagcattgaatttgctaggtctttccccggaaacctatttttcaatctatactgataacgaggacggaacaccactaggaggttcctcactaccccctccatttcccagctgtacgctaaggacggcattaacaaggtacgcggacttgttgaatagtccaaagaagagtgcacttctggctttagccgctcacgcatccaatccagttgaagcggatcgtttaagatacctcgcttccccagcagggaaagatgaatatgcccaatctgtgattggtagccagaaaagtttactcgaggtcatggcagagtttccctcagcgaagcctcctttgggcgttttctttgctgcggttgcacctcgactccaaccgcgtttctacagtatttcctctagtccacggatggcaccatctcgtatccatgttacttgtgcgttggtgtacgataagatgccgactggccgcatacacaaaggtgtctgctcaacttggatgaagaatagtgtaccaatggaaaaatctcatgagtgttcgtgggcaccaatattcgttaggcaatcaaattttaagcttccagctgaatccaaagtcccaattatcatggttggccctgggaccggtctagcaccttttagaggatttctacaagaaagactagccttaaaggaatctggtgtggaattgggcccgtctattcttttcttcggatgcagaaacagaagaatggattatatttatgaagatgagttaaacaattttgttgaaacaggggctctttcagaattagtaattgccttttcaagggaaggtcctaccaaagaatacgttcagcataaaatggccgagaaagcttcagacatctggaatttgatcagtgaaggtgcttatttgtacgtatgtggcgatgctaaaggtatggctaaggatgtgcataggacgcttcacactataatgcaagaacagggtagtttagacagttcgaaggccgaatctatggtgaagaacttgcaaatgaatggtagatatttgcgtgatgtgtggtaa

SEQ ID NO: 267 - DNA, 2079 bp, Artificial Sequence
  Synthetic
atgacctctgcattgtatgcttctgatcttttcaaacaattaaagagtataatgggtactgactccttgtctgatgatgtagttttggtaatagctactacatctttagctctagtcgctggttttgtggtcttgctttggaagaagactactgctgatagatccggtgaattgaaacctctgatgattcctaaatctttgatggctaaagatgaagacgatgatttggacctgggctctggtaagacaagagtttctattttttttggtactcaaactggtactgccgagggttttgctaaggctttgtctgaggaaattaaagctagatatgaaaaggccgcagttaaggtgattgatttggatgactatgctgctgatgatgatcaatacgaagaaaaattgaagaaagaaactttggcattcttctgtgtggctacttacggtgatggtgaaccaactgacaacgctgctagattttataaatggttcactgaggaaaatgaaagagatattaagttacaacaattggcttatggtgtttttgccctaggaaatagacaatacgagcattttaataaaatcggtatcgttttggacgaggaactatgtaagaaaggtgctaaaagattaattgaagttggtttaggtgatgacgatcaatcaattgaagatgactttaacgcttggaaagagtctttgtggtctgagttggataaactgttgaaggatgaagatgacaaatcagtagcaacaccatatactgctgttataccagaatatagagttgttactcatgatccaagatttactactcagaaatctatggagtctaatgttgctaacggtaatactactattgatattcatcatccatgcagagtagacgttgccgttcaaaaagaattgcatacccatgagtccgatagatcttgtatccatcttgagttcgatatttctaggactggtattacctatgaaactggtgaccatgtgggtgtttatgcagaaaatcatgtcgaaatagttgaagaagctggtaagttgttgggtcattccttggacctggtcttttctatccatgctgacaaagaagatggaagtccattggaatctgctgtccctccaccatttccaggaccatgcactttgggtactggtttggctagatatgcagacttgttgaatccaccaagaaaatcagcattggttgctctggctgcttatgcaaccgagcctagtgaagctgaaaaattgaagcatcttacttctccagatggtaaagatgaatactctcaatggattgttgcttctcaaagaagtttattagaagtaatggcagcatttccatctgctaaaccaccattaggtgttttctttgctgctatcgctccaagattacagccaagatattattcaatatcttcttcaccaagattggctccatctagggttcatgtcacttctgctctagtttacggtccaacaccaactggtagaatccataagggtgtttgttccacttggatgaagaatgctgttccagcagagaaatctcatgaatgctctggtgctccaatttttataagagcttctaactttaaattaccatctaatccatctactccaatagtaatggtaggaccaggtactggtttagcaccatttagaggtttccttcaagaaagaatggctttaaaagaggacggtgaagaactgggttcttctctgttattctttggttgtagaaatagacaaatggactttatttacgaagatgaattgaataattttgttgatcagggagtaatttccgagttgataatggctttttctagggaaggtgctcaaaaagagtacgtccaacataaaatgatggaaaaagctgctcaggtatgggatttaattaaagaagaaggttatttgtatgtatgcggtgacgctaaaggtatggcaagagatgtacatagaactttgcatactatagtgcaagaacaagaaggtgtgtcttctagtgaagctgaggccattgttaagaaactacaaactgaaggtagatatctgagagatgtatggtaa

SEQ ID NO: 268 - DNA, 951 bp, Artificial Sequence
  Synthetic
atggatgaaatcgaacatattaccatcaatacaaatggaatcaaaatgcatattgcgtcagtcggcacaggaccagttgttctcttgctacacggctttccagaattatggtactcttggagacaccaactactttacctgtcctccgttgggtacagagcaatagctccagatttgagaggctatggcgatactgacagtccagctagtcctacctcttatactgctcttcatattgtaggtgacctggtcggcgcattagacgaattgggaatagaaaaggtctttttagtgggtcatgactggggtgctattatcgcatggtacttttgtttgtttagaccagatagaattaaagcacttgtgaatttgtctgtccagtttatcccacgtaacccagcaataccttttatagaaggtttcagaacagcttttggtgatgacttctacatttgtagatttcaagtacctggggaagctgaagaggatttcgcgtctatcgatactgctcaattgtttaaaacttcattatgcaatagaagctcagcccctccttgtttgcctaaagagattggttttagggctatcccaccaccagaaaatctgccatcttggctcacagaggaagatatcaacttctacgcagccaagtttaaacaaactggttttactggtgcccttaactattatagagcattcgacttgacatgggaattaacagccccatggacaggagcccagatccaagttcctgtaaagttcatagttggtgattcagatctcacgtaccatttccctggtgctaaggaatacatccacaacggagggtttaaaagagatgtgccactattagaggaagttgttgtggtaaaagatgcctgccacttcattaaccaagagcgaccacaagagattaatgctcatattcatgacttcatcaataagttctaa

SEQ ID NO: 269 - DNA, 1016 bp, Artificial Sequence
  Synthetic
atgaaagtaagaatttttgaaaattcgaattcagacgcgattgaacatagaaccgtaagtgttaatggtatcaatatgcatgtggcagaaaagggagagggacctgtcgtgttgttgcttcatggtttcccagaattgtggtacagttggagacatcaaatattggctctttcctctttaggttacagagctgtcgcaccagacttacgaggctacggggatacagatgccccagggtcaatttcatcatacacatgctttcacatcgtaggagatctcgtggctctagttgagtctctgggtatggacagggtttttgttgtagcccacgattggggtgccatgatcgcttggtgtttgtgtctgtttagacctgaaatggttaaagcttttgtttgtctctccgtcccattcagacagagaaaccctaagatgaaaccagttcaaagtatgagagcctttttcggcgatgattactatatttgcagatttcaaaatcctggggaaatcgaagaggagatggctcaagtgggtgcaagggaagtcttaagaggaattctaacatctcgtcgtcctggaccaccaatcttaccaaaagggcaagcttttagagcaagaccaggagcatccactgcattgccatcttggctatctgaaaaagatctgtcatttttcgcttctaagtatgatcaaaagggctttacaggcccactaaactactacagagccatggatcttaattgggaattgactgcgtcatggactggtgtccaagttaaagtacctgtcaaatacatcgtgggtgacgttgacatggtttttacgactcctggtgtaaaggaatatgtcaacggcggtggtttcaaaaaggacgttccatttttacaggaagtggtaatcatggaaggcgttggtcatttcattaatcaggaaaaacctgaggagatttcatctcatatacacgatttcataagcaaattcgagctcttaattaacaattcttcgccagaggttaa

SEQ ID NO: 270 - DNA, 951 bp, Artificial Sequence
  Synthetic
atggaccagatcgaacacattacgataaataccaacggaattaagatgcatatagcgagtgtgggtacagggccagtcgttcttctactgcatggtttccctgagttgtggtactcctggagacatcaactcttatatttgtcttcggttggatatcgcgctattgcaccggatttaaggggctacggtgatactgactcacccgccagccctacttcttatacagctttacacatcgtaggcgatctggtaggtgcattggatgaactaggaatagaaaaagtttttctagtgggtcatgactggggcgccattattgcttggtatttttgccttttccgtccagatagaatcaaagcgttagttaatttgtccgtccaatttattccacgaaaccctgcaatccccttcattgaagggtttagaacagccttcggtgacgatttttacatgtgtagatttcaagtcccaggcgaggctgaagaggattttgcctctatagatactgctcagctgttcaagaccagtctttgtaataggtcatcggctcctccatgtttgcccaaagaaatcggtttccgggcaattccaccgcctgaaaacttaccaagctggttgaccgaggaagacattaactactatgcagcgaagtttaaacaaacgggtttcactggtgctctcaattattaccgtgcatttgatttaacatgggagttaacagccccctggactggtgctcagatacaagtgccggttaagttcatagtaggggattcagacttgacatatcattttccaggagccaaagaatatatacacaatggaggttttaaaaaagatgtacctcttttggaagaagtagttgtggtgaaggatgcatgccatttcatcaaccaagaaaggccacaagaaattaatgctcacatccatgactttatcaataaattctaa

SEQ ID NO: 271 - DNA, 951 bp, Artificial Sequence
  Synthetic
atggaaaagattgaacacaccactatttctaccaatggtatcaacatgcatgttgcctctattggttctggtccagctgtcttgttcttgcacggtttcccagaattgtggtattcttggagacaccaattattattcttgtcttccatgggttacagagctatcgctccagacttaagaggttttggtgacaccgacgctccaccatctccatcttcttacaccgctcaccacattgtcggtgacttggtcggtttgttagaccaattgggtattgaccaagtttttttggttggtcacgactggggtgctatgatggcctggtacttttgtttgttccgtccagatagagttaaggctttggtcaatttatctgtccacttcttacgtagacacccatctatcaaatttgttgatggtttcagagccttattaggtgatgatttttacttctgtcaattccaagaaccaggtgtcgctgaagccgacttcggttctgtcgatgttgctaccatgttgaagaaattcttgaccatgagagatccaagacctccaatgattcctaaggaaaagggtttcagagccttggaaactccagatccattgccagcctggttaactgaagaagacattgactacttcgccggtaagtttcgtaagaccggttttaccggtggttttaattactacagagccttcaacttgacttgggagttgaccgctccatggtctggttctgaaatcaaggtcgctgccaagttcattgttggtgatttagacttggtttatcacttccctggtgccaaggagtatatccatggtggtggtttcaaaaaggacgtccctttgttggaggaagttgttgttgttgatggtgctgctcacttcatcaaccaagaaagaccagctgaaatttcttccttgatttacgactttatcaagaagttctaa

SEQ ID NO: 272 - DNA, 945 bp, Artificial Sequence
  Synthetic
atggagaagattgaacactctactatcgctactaatggtatcaatatgcacgttgcctctgctggttctggtccagctgttttgtttttgcacggtttcccagaattatggtattcctggagacaccaattgttgtacttgtcttctttgggttacagagctattgctccagatttgagaggtttcggtgacaccgatgctccaccatctccatcctcctacaccgcccaccacatcgttggtgatttggtcggtttgttggatcaattaggtgtcgatcaagtctttttggttggtcatgattggggtgctatgatggcctggtacttctgtttgttccgtccagacagagtcaaggccttagttaatttatctgtccacttcaccccacgtaacccagctatctctccattagatggtttccgtttgatgttgggtgatgatttctacgtttgtaagtttcaagaaccaggtgtcgctgaagccgatttcggttctgttgatactgccactatgtttaaaaagttcttgaccatgagagatccacgtccacctattattccaaacggtttcagatccttggccaccccagaagctttgccatcctggttgactgaagaggatatcgattactttgctgccaaattcgctaagactggttttactggtggtttcaactactacagagctatcgacttgacctgggagttgactgctccatggtccggttctgaaatcaaggttccaactaagtttattgttggtgacttagacttggtttaccatttcccaggtgttaaggaatacattcacggtggtggtttcaagaaggacgttccattcttggaagaagttgtcgtcatggaaggtgctgctcattttatcaaccaagaaaaagctgacgaaattaattctttgatctatgacttcattaaacaattctag

SEQ ID NO: 273 - DNA, 951 bp, Artificial Sequence
  Synthetic
atggaaaacatcgaacacaccactgtccaaactaacggtatcaagatgcacgtcgctgctattggtactggtccaccagttttgttgttgcatggtttcccagaattgtggtattcttggagacaccaattgttgtacttgtcttctgctggttacagagctatcgctccagacttgagaggttacggtgataccgacgctccaccttccccatcttcctataccgctttacacattgtcggtgatttggtcggtttgttggacgtcttgggtatcgaaaaagtcttcttaatcggtcacgactggggtgccatcatcgcctggtacttctgtttattcagacctgatagaatcaaagctttggttaacttgtctgttcaattcttcccaagaaacccaaccaccccatttgttaagggtttcagagccgtcttgggtgatcaattttacatggttagattccaagaaccaggtaaagctgaagaagaattcgcttccgttgatattagagaattcttcaagaatgttttgtccaacagagatccacaagctccatatttgccaaatgaagttaagttcgaaggtgtcccaccaccagctttggctccatggttgaccccagaagatatcgatgtctacgctgacaaattcgctgaaactggtttcactggtggtttgaactactacagagcctttgacagaacctgggaattaactgctccatggaccggtgcccgtattggtgtcccagtcaagttcattgtcggtgatttggacttgacttaccactttccaggtgctcaaaaatacattcacggtgaaggtttcaagaaggctgtcccaggtttggaagaagttgtcgttatggaggatacctctcacttcattaaccaagaaagaccacacgaaattaattctcacatccacgatttcttctctaagttctgttaa

SEQ ID NO: 274 - DNA, 951 bp, Artificial Sequence
  Synthetic
atggatcaaattgaacacatcactattaacaccaacggtatcaaaatgcatatcgcctctgttggtactggtcctgttgttttgttgttgcatggtttcccagaattgtggtactcttggcgtcatcaattgttgtatttgtcctctgtcggttacagagctattgctccagatttaagaggttacggtgatactgactctccagcctctccaacttcttataccgctttgcatatcgttggtgacttggtcggtgctttggatgaattgggtattgaaaaggtcttcttggtcggtcatgattgggctgccatcatcgcttggtacttttgtttgtttagaccagatcgtattaaagctttagttaatttgtctgttcaattcatcccaagaaacccagctatcccatttattgaaggtttcagaaccgcttttggtgatgatttctacatgtgtagattccaagttccaggtgaagctgaagaagactttgcttctattgatactgctcaattgttcaaaacctccttgtgtaacagatcctccgctccaccatgcttgccaaaagaaatcggtttcagagctattccaccaccagaaaatttgccatcttggttgaccgaggaagacattaattactacgctgctaagttcaagcaaaccggtttcactggtgctttaaactactatagagctttcgatttgacctgggaattaactgctccatggaccggtgctcaaattcaagtcccagtcaagttcattgttggtgattctgacttgacttaccattttccaggtgctaaggaatacatccacaacggtggtttcaagaaggacgttccattgttggaagaagttgttgttgtcaaggacgcttgtcacttcatcaaccaagaaagaccacaagaaattaacgctcacattcatgactttattaacaagttctaa

SEQ ID NO: 275 - DNA, 942 bp, Artificial Sequence
  Synthetic
atggagaagatcgaacactcaacgattgccaccaacggaataaatatgcatgtggcgagcgcaggtagtgggccagctgttcttttcctgcatggttttcctgaattgtggtactcttggagacatcaactattatatctctcctcgttaggatatcgcgctattgcaccggatttgaggggctttggtgacacagatgcccccccatctccttcatcttacactgctcaccacatagtaggcgacctggtcggtttgttagatcagctaggagtagatcaagttttcctagtcggtgactggggagcgatgatggcttggtatttttgcttatttagacctgatcgggttaaagctcttgtgaatttgagtgtgcatttcacaccacgtaacccagcaatttcccctttggatggctttcgacttatgttaggggatgacttctacgtatgtaaattccaagagccaggtgttgccgaagcagattttggttcggttgacactgctaccatgttcaagaaatttttgacgatgagagatccgaggcccccaatcattcccaatggttttagaagtcttgcgacacccgaagcactcccttcttggttaactgaagaggatatagactattttgccgcaaagttcgctaagaccggtttcacgggcgggtttaattactatagagccattgatctaacatgggaattaactgccccttggtcaggaagcgaaatcaaagtcccgactaaatttatagtaggggacctggatctcgtttatcatttcccaggtgtcaaagaatatattcatggaggaggttttaaaaaggacgttccatttttggaggaagttgtcgtaatggaaggtgctgctcactttataaaccaggagaaggcagatgagatcaactcattgatctacgattttattaaacaattctaa

SEQ ID NO: 276 - DNA, 951 bp, Artificial Sequence
  Synthetic
atggagaagatcgaacacaccacgatttcaacaaacggaataaatatgcatgtggcgagcattggtagtgggccagccgttcttttcctgcatggttttcctgaattgtggtactcttggagacatcaactattatttctctcctcgatgggatatcgcgctatcgcaccggatttgaggggcttcggtgacactgatgctcccccatctccttcatcttatacagcacaccacatagtaggcgacctagtcggtttattagatcagctgggaattgatcaagttttcctcgtaggtcatgactggggcgccatgatggcttggtacttttgcttgtttcgtccagatagagttaaagcgttagttaatttgtccgtccatttcttacggcgacatcctagtattaaatttgtcgatgggtttagagcactactaggtgacgatttttatttctgtcaatttcaggaaccaggcgtggctgaagccgactttggttctgtggatgttgctactatgttgaagaaattccttaccatgagagatccacgtccccccatgatacctaaggagaaaggcttcagggcattagaaactcctgatccactcccagcctggttgacagaggaagatatagactatttcgcgggaaagtttagaaaaactggatttaccggtggtttcaactactatagagcttttaatcttacgtgggaacttacagcaccgtggtctggttcggaaatcaaggtagctgcaaaatttattgtgggagatcttgatctcgtttaccacttcccgggcgccaaagaatacattcatggaggtggctttaaaaaagacgttcccttattggaagaggtcgtagtggtcgatggggccgctcacttcataaaccaagagaggcctgctgagatttcttcacttatctatgacttcatcaagaagttttaa

SEQ ID NO: 277 - DNA, 1587 bp, Artificial Sequence
  Synthetic
atggtggaccaatgtgcacttgggtggatcctagcgtcagctctgggcttagtaatagccctctgcttctttgtcgctcctcgaagaaaccaccgcggagttgattcgaaagagagagatgaatgtgttcagtctgcggcaaccactaagggtgaatgtaggtttaatgaccgtgatgtagatgttattgtcgtgggtgctggtgttgccggatccgcattggcacatacgttgggcaaagacggtagaagggtgcatgtaattgaaagagacctcacagaaccagatcggatagttggggagttacttcaaccgggtggttacttaaagctaatcgagttaggattgcaagattgcgtggaagaaattgatgctcagagagtatatggctatgccttgttcaaagatggaaaaaatacacgtttgagctacccattagagaactttcacagtgacgtttctggtcgatcattccataatggtagatttattcaacgtatgagagaaaaggctgcgtccctacccaacgtcaggctggaacaaggaactgttacctcgctcttggaggaaaaaggcactatcaagggtgtccaatataaatcaaagaatggggaagaaaaaacagcatacgctccgctcactatagtgtgtgacggttgtttctctaacttacgccgaagtctgtgcaatcctatggtcgatgttccaagctattttgtaggcttggtgttggaaaattgcgagctgccattcgctaaccacggacatgtaattttaggcgatccttctcccattcttttttaccagatttccaggaccgaaataagatgtttggttgatgtccctggtcaaaaagttccatcaatagcaaatggcgagatggaaaagtatctgaaaacagtggtagctcctcaggttcctccacaaatctatgatagttttattgcggccatagacaagggtaacatcaggacgatgcccaatagatctatgccagctgccccacatcctacgccgggtgcccttctaatgggggatgcatttaacatgagacatcccctgacaggaggtggtatgaccgtggcattgagcgatattgtagttttacgtaatcttttaaaacctctcaaggacctgtcagatgcaagtactctgtgcaagtatttagaaagtttctacacccttagaaaaccagttgcttcaactattaacacgttggccggggctctatataaagtattttgtgcctctccggaccaggctaggaaagaaatgcgtcaagcttgtttcgattatttatccttgggaggcatattttcaaatggccctgtatcgctattaagcggactaaacccaagaccactatctctagtcctccacttctttgctgtggcaatatacggtgttggtcgcttgctacttccatttccttctgtcaaggggatctggattggagcgcgtttaatctatagcgcgagtggtattatttttcccattataagagctgagggtgttagacagatgtttttccctgcaacagttcctgcctactataggtccccacccgtgttcaaacccatagtttaa

SEQ ID NO: 278 - DNA, 1575 bp, Artificial Sequence
  Synthetic
atggtggaccaatgtgcacttgggtggatcctagcgtcagttctgggcgctgccgcactctactttttgttcggacgaaaaaatggtggtgtatcgaacgaaaggcgccatgagtccataaagaatattgctactaccaacggtgaatataaaagctctaattccgatggggatattataatcgtcggcgcaggagttgctggtagtgccttagcttatacgttgggtaaggacggaagaagagtgcacgtcattgagcgtgatttgacagaaccggatagaatcgtgggggaattattgcagcccggcggttacttaaaactaactgagttaggtcttgaagactgcgttgatgatattgacgcacaaagggtatatggttacgctttatttaaggatggtaaagatacacggctatcttatccattagaaaagttccattcagacgtagccggaaggtcttttcacaacggcagattcatccaaagaatgcgggaaaaagcggctagtttgccaaaagtttcacttgagcagggtaccgtaacttcgctgcttgaagaaaatggcattataaagggcgtccaatacaaaacaaaaacaggtcaagaaatgaccgcctatgcacctctcactattgtttgtgacggatgcttttctaacctgcgtagatccttgtgtaatcctaaggttgatgtaccatcatgctttgtgggcttagttcttgagaactgtgatctaccctacgctaatcatgggcatgtgatactggctgaccctagtccaatattgttctatcgaatttcttcaacggagatcagatgtttagtcgacgttcccggacaaaaagttccttcgatctctaatggtgaaatggcgaattacctgaagaacgtagtcgccccacagataccaagtcagttgtatgatagctttgttgcagcaattgataaaggaaatattaggactatgccgaaccgtagcatgccggccgatccttatcccactccgggtgctttattgatgggtgacgcgtttaatatgagacacccattgacaggcggaggtatgaccgtcgcgctgagtgatgttgtcgtgctaagagacctattaaaaccattacgcgatttaaacgatgctcctacactgtcaaagtaccttgaagcattctacacgctacgaaaaccagtagccagtaccatcaacacattggctggtgcattgtataaggtgttttgcgcatctccagatcaagcacgtaaagaaatgagacaggcatgtttcgattatttgtctcttggtggtattttttccaatggacctgtatcactactctcagggttgaatccaaggccaattagcctagtactacatttctttgccgttgccatctacggcgtaggtcgtctattaataccgtttccttctcctaagagagtctggatcggcgctagaattataagcggcgcttcggcaattatcttccctataataaaggctgaaggagttagacaaatgttctttccggctactgtggcggcttattatcgtgcaccaagagttgtcaagggtaggtaa

SEQ ID NO: 279 - DNA, 1536 bp, Artificial Sequence
  Synthetic
atggacggggtaattgatatgcagaccatacccctacgtacggccatcgcaattggaggcactgcggttgctcttgtcgtggctttgtacttctggtttctccgtagctatgcatctccttcccaccattcaaatcatttaccgcctgttccagaagtaccaggtgtgccagttttaggtaacctgttgcaattgaaagagaagaaaccctatatgacatttactaagtgggccgaaatgtacggtcctatctattcgattcgcacaggagctacatcaatggtcgttgtaagtagtaatgagatagcgaaagaagtggttgtgactaggttcccatctatctcaactagaaaactgtcctatgccttgaaggtcttaaccgaagataaatctatggtcgcaatgagcgattaccatgactaccacaaaacagttaagcgacatattttaacggctgttctaggcccaaacgcacaaaagaaatttagagctcacagagataccatgatggagaatgtaagcaacgaattgcatgctttctttgaaaagaatcctaatcaggaagtcaaccttagaaaaatatttcaatcccaacttttcggtttagctatgaaacaggcattagggaaggatgtggaatctatttatgtaaaggacctggaaactaccatgaaaagggaagagatattcgaagttcttgttgttgaccccatgatgggagccattgaagtcgattggcgagattttttcccgtatctcaaatgggtgccaaataaatcttttgaaaatataatccataggatgtacacgagaagagaggccgttatgaaagcgttgattcaagagcacaagaaaaggatcgcttcaggtgagaacctaaattcctacatagattatctcttgagtgaagctcaaacattaactgacaaacagttattaatgtcgttgtgggaacctattatagaatcgtctgatactaccatggtaacaacagaatgggcaatgtatgaacttgcgaagaaccctaatatgcaagatcgtctgtacgaagagattcaatcggtttgtggaagcgagaagattacagaagaaaacttatcacaactcccatatctatatgccgttttccaggaaactctgagaaagcattgccctgtgccgatcatgccacttagatacgtacatgagaacactgttttgggtggttaccacgtaccagcaggcaccgaagtggcaatcaatatttatggctgtaatatggacaagaaagtgtgggaaaatcccgaagagtggaatccagaacgttttctgtctgaaaaagagagtatggatttgtataaaacgatggcatttggtggaggtaaaagagtttgtgcgggatctctacaagctatggtaattagttgcatcggcatcgggaggttagttcaagattttgaatggaaactaaaagatgacgctgaagaagatgtgaatacattaggtttgactacgcaaaagctacaccctttgttagcactaattaacccgcggaaa

SEQ ID NO: 280 - protein, 520 aa, Siraitia grosvenorii
MEMSSSVAATISIWMVVVCIVGVGWRVVNWVWLRPKKLEKRLREQGLAGNSYRLLFGDLKERAAMEEQANSKPINFSHDIGPRVFPSMYKTIQNYGKNSYMWLGPYPRVHIMDPQQLKTVFTLVYDIQKPNLNPLIKFLLDGIVTHEGEKWAKHRKIINPAFHLEKLKDMIPAFFHSCNEIVNEWERLISKEGSCELDVMPYLQNLAADAISRTAFGSSYEEGKMIFQLLKELTDLVVKVAFGVYIPGWRFLPTKSNNKMKEINRKIKSLLLGIINKRQKAMEEGEAGQSDLLGILMESNSNEIQGEGNNKEDGMSIEDVIEECKVFYIGGQETTARLLIWTMILLSSHTEWQERARTEVLKVFGNKKPDFDGLSRLKVVTMILNEVLRLYPPASMLTRIIQKETRVGKLTLPAGVILIMPIILIHRDHDLWGEDANEFKPERFSKGVSKAAKVQPAFFPFGWGPRICMGQNFAMIEAKMALSLILQRFSFELSSSYVHAPTVVFTTQPQHGAHIVLRKL

SEQ ID NO: 281 - protein, 473 aa, Siraitia grosvenorii
MWTVVLGLATLFVAYYIHWINKWRDSKFNGVLPPGTMGLPLIGETIQLSRPSDSLDVHPFIQKKVERYGPIFKTCLAGRPVVVSADAEFNNYIMLQEGRAVEMWYLDTLSKFFGLDTEWLKALGLIHKYIRSITLNHFGAEALRERFLPFIEASSMEALHSWSTQPSVEVKNASALMVFRTSVNKMFGEDAKKLSGNIPGKFTKLLGGFLSLPLNFPGTTYHKCLKDMKEIQKKLREVVDDRLANVGPDVEDFLGQALKDKESEKFISEEFIIQLLFSISFASFESISTTLTLILKLLDEHPEVVKELEAEHEAIRKARADPDGPITWEEYKSMTFTLQVINETLRLGSVTPALLRKTVKDLQVKGYIIPEGWTIMLVTASRHRDPKVYKDPHIFNPWRWKDLDSITIQKNFMPFGGGLRHCAGAEYSKVYLCTFLHILCTKYRWTKLGGGRIARAHILSFEDGLHVKFTPKE

SEQ ID NO: 282 - protein, 701 aa, Siraitia grosvenorii
MKVSPFEFMSAIIKGRMDPSNSSFESTGEVASVIFENRELVAILTTSIAVMIGCFVVLMWRRAGSRKVKNVELPKPLIVHEPEPEVEDGKKKVSIFFGTQTGTAEGFAKALADEAKARYEKATFRVVDLDDYAADDDQYEEKLKNESFAVFLLATYGDGEPTDNAARFYKWFAEGKERGEWLQNLHYAVFGLGNRQYEHFNKIAKVADELLEAQGGNRLVKVGLGDDDQCIEDDFSAWRESLWPELDMLLRDEDDATTVTTPYTAAVLEYRVVFHDSADVAAEDKSWINANGHAVHDAQHPFRSNVVVRKELHTSASDRSCSHLEFNISGSALNYETGDHVGVYCENLTETVDEALNLLGLSPETYFSIYTDNEDGTPLGGSSLPPPFPSCTLRTALTRYADLLNSPKKSALLALAAHASNPVEADRLRYLASPAGKDEYAQSVIGSQKSLLEVMAEFPSAKPPLGVFFAAVAPRLQPRFYSISSSPRMAPSRIHVTCALVYDKMPTGRIHKGVCSTWMKNSVPMEKSHECSWAPIFVRQSNFKLPAESKVPIIMVGPGTGLAPFRGFLQERLALKESGVELGPSILFFGCRNRRMDYIYEDELNNFVETGALSELVIAFSREGPTKEYVQHKMAEKASDIWNLISEGAYLYVCGDAKGMAKDVHRTLHTIMQEQGSLDSSKAESMVKNLQMNGRYLRDVW

SEQ ID NO: 283 - protein, 692 aa, Arabidopsis thaliana [sequence omitted]

SEQ ID NO: 284 - protein, 316 aa, Siraitia grosvenorii
MDEIEHITINTNGIKMHIASVGTGPVVLLLHGFPELWYSWRHQLLYLSSVGYRAIAPDLRGYGDTDSPASPTSYTALHIVGDLVGALDELGIEKVFLVGHDWGAIIAWYFCLFRPDRIKALVNLSVQFIPRNPAIPFIEGFRTAFGDDFYICRFQVPGEAEEDFASIDTAQLFKTSLCNRSSAPPCLPKEIGFRAIPPPENLPSWLTEEDINFYAAKFKQTGFTGALNYYRAFDLTWELTAPWTGAQIQVPVKFIVGDSDLTYHFPGAKEYIHNGGFKRDVPLLEEVVVVKDACHFINQERPQEINAHIHDFINKF

SEQ ID NO: 285 - protein, 317 aa, Siraitia grosvenorii
MDAIEHRTVSVNGINMHVAEKGEGPVVLLLHGFPELWYSWRHQILALSSLGYRAVAPDLRGYGDTDAPGSISSYTCFHIVGDLVALVESLGMDRVFVVAHDWGAMIAWCLCLFRPEMVKAFVCLSVPFRQRNPKMKPVQSMRAFFGDDYYICRFQNPGEIEEEMAQVGAREVLRGILTSRRPGPPILPKGQAFRARPGASTALPSWLSEKDLSFFASKYDQKGFTGPLNYYRAMDLNWELTASWTGVQVKVPVKYIVGDVDMVFTTPGVKEYVNGGGFKKDVPFLQEVVIMEGVGHFINQEKPEEISSHIHDFISKF

SEQ ID NO: 286 - protein, 316 aa, Siraitia grosvenorii
MDQIEHITINTNGIKMHIASVGTGPVVLLLHGFPELWYSWRHQLLYLSSVGYRAIAPDLRGYGDTDSPASPTSYTALHIVGDLVGALDELGIEKVFLVGHDWGAIIAWYFCLFRPDRIKALVNLSVQFIPRNPAIPFIEGFRTAFGDDFYMCRFQVPGEAEEDFASIDTAQLFKTSLCNRSSAPPCLPKEIGFRAIPPPENLPSWLTEEDINYYAAKFKQTGFTGALNYYRAFDLTWELTAPWTGAQIQVPVKFIVGDSDLTYHFPGAKEYIHNGGFKKDVPLLEEVVVVKDACHFINQERPQEINAHIHDFINKF

SEQ ID NO: 287 - protein, 316 aa, Siraitia grosvenorii
MEKIEHTTISTNGINMHVASIGSGPAVLFLHGFPELWYSWRHQLLFLSSMGYRAIAPDLRGFGDTDAPPSPSSYTAHHIVGDLVGLLDQLGIDQVFLVGHDWGAMMAWYFCLFRPDRVKALVNLSVHFLRRHPSIKFVDGFRALLGDDFYFCQFQEPGVAEADFGSVDVATMLKKFLTMRDPRPPMIPKEKGFRALETPDPLPAWLTEEDIDYFAGKFRKTGFTGGFNYYRAFNLTWELTAPWSGSEIKVAAKFIVGDLDLVYHFPGAKEYIHGGGFKKDVPLLEEVVVVDGAAHFINQERPAEISSLIYDFIKKF

SEQ ID NO: 288 - protein, 314 aa, Siraitia grosvenorii
MEKIEHSTIATNGINMHVASAGSGPAVLFLHGFPELWYSWRHQLLYLSSLGYRAIAPDLRGFGDTDAPPSPSSYTAHHIVGDLVGLLDQLGVDQVFLVGHDWGAMMAWYFCLFRPDRVKALVNLSVHFTPRNPAISPLDGFRLMLGDDFYVCKFQEPGVAEADFGSVDTATMFKKFLTMRDPRPPIIPNGFRSLATPEALPSWLTEEDIDYFAAKFAKTGFTGGFNYYRAIDLTWELTAPWSGSEIKVPTKFIVGDLDLVYHFPGVKEYIHGGGFKKDVPFLEEVVVMEGAAHFINQEKADEINSLIYDFIKQF

SEQ ID NO: 289 - protein, 316 aa, Siraitia grosvenorii
MENIEHTTVQTNGIKMHVAAIGTGPPVLLLHGFPELWYSWRHQLLYLSSAGYRAIAPDLRGYGDTDAPPSPSSYTALHIVGDLVGLLDVLGIEKVFLIGHDWGAIIAWYFCLFRPDRIKALVNLSVQFFPRNPTTPFVKGFRAVLGDQFYMVRFQEPGKAEEEFASVDIREFFKNVLSNRDPQAPYLPNEVKFEGVPPPALAPWLTPEDIDVYADKFAETGFTGGLNYYRAFDRTWELTAPWTGARIGVPVKFIVGDLDLTYHFPGAQKYIHGEGFKKAVPGLEEVVVMEDTSHFINQERPHEINSHIHDFFSKFC

SEQ ID NO: 290 - protein, 316 aa, Siraitia grosvenorii
MDQIEHITINTNGIKMHIASVGTGPVVLLLHGFPELWYSWRHQLLYLSSVGYRAIAPDLRGYGDTDSPASPTSYTALHIVGDLVGALDELGIEKVFLVGHDWAAIIAWYFCLFRPDRIKALVNLSVQFIPRNPAIPFIEGFRTAFGDDFYMCRFQVPGEAEEDFASIDTAQLFKTSLCNRSSAPPCLPKEIGFRAIPPPENLPSWLTEEDINYYAAKFKQTGFTGALNYYRAFDLTWELTAPWTGAQIQVPVKFIVGDSDLTYHFPGAKEYIHNGGFKKDVPLLEEVVVVKDACHFINQERPQEINAHIHDFINKF

SEQ ID NO: 291 - protein, 313 aa, Siraitia grosvenorii
MEKIEHSTIATNGINMHVASAGSGPAVLFLHGFPELWYSWRHQLLYLSSLGYRAIAPDLRGFGDTDAPPSPSSYTAHHIVGDLVGLLDQLGVDQVFLVGDWGAMMAWYFCLFRPDRVKALVNLSVHFTPRNPAISPLDGFRLMLGDDFYVCKFQEPGVAEADFGSVDTATMFKKFLTMRDPRPPIIPNGFRSLATPEALPSWLTEEDIDYFAAKFAKTGFTGGFNYYRAIDLTWELTAPWSGSEIKVPTKFIVGDLDLVYHFPGVKEYIHGGGFKKDVPFLEEVVVMEGAAHFINQEKADEINSLIYDFIKQF

SEQ ID NO: 292 - protein, 316 aa, Siraitia grosvenorii; identical to SEQ ID NO: 287

SEQ ID NO: 293 - protein, 528 aa, Siraitia grosvenorii
MVDQCALGWILASALGLVIALCFFVAPRRNHRGVDSKERDECVQSAATTKGECRFNDRDVDVIVVGAGVAGSALAHTLGKDGRRVHVIERDLTEPDRIVGELLQPGGYLKLIELGLQDCVEEIDAQRVYGYALFKDGKNTRLSYPLENFHSDVSGRSFHNGRFIQRMREKAASLPNVRLEQGTVTSLLEEKGTIKGVQYKSKNGEEKTAYAPLTIVCDGCFSNLRRSLCNPMVDVPSYFVGLVLENCELPFANHGHVILGDPSPILFYQISRTEIRCLVDVPGQKVPSIANGEMEKYLKTVVAPQVPPQIYDSFIAAIDKGNIRTMPNRSMPAAPHPTPGALLMGDAFNMRHPLTGGGMTVALSDIVVLRNLLKPLKDLSDASTLCKYLESFYTLRKPVASTINTLAGALYKVFCASPDQARKEMRQACFDYLSLGGIFSNGPVSLLSGLNPRPLSLVLHFFAVAIYGVGRLLLPFPSVKGIWIGARLIYSASGIIFPIIRAEGVRQMFFPATVPAYYRSPPVFKPIV

SEQ ID NO: 294 - protein, 524 aa, Siraitia grosvenorii
MVDQCALGWILASVLGAAALYFLFGRKNGGVSNERRHESIKNIATTNGEYKSSNSDGDIIIVGAGVAGSALAYTLGKDGRRVHVIERDLTEPDRIVGELLQPGGYLKLTELGLEDCVDDIDAQRVYGYALFKDGKDTRLSYPLEKFHSDVAGRSFHNGRFIQRMREKAASLPKVSLEQGTVTSLLEENGIIKGVQYKTKTGQEMTAYAPLTIVCDGCFSNLRRSLCNPKVDVPSCFVGLVLENCDLPYANHGHVILADPSPILFYRISSTEIRCLVDVPGQKVPSISNGEMANYLKNVVAPQIPSQLYDSFVAAIDKGNIRTMPNRSMPADPYPTPGALLMGDAFNMRHPLTGGGMTVALSDVVVLRDLLKPLRDLNDAPTLSKYLEAFYTLRKPVASTINTLAGALYKVFCASPDQARKEMRQACFDYLSLGGIFSNGPVSLLSGLNPRPISLVLHFFAVAIYGVGRLLIPFPSPKRVWIGARIISGASAIIFPIIKAEGVRQMFFPATVAAYYRAPRVVKGR

SEQ ID NO: 295 - protein, 512 aa, Lactuca sativa
MDGVIDMQTIPLRTAIAIGGTAVALVVALYFWFLRSYASPSHHSNHLPPVPEVPGVPVLGNLLQLKEKKPYMTFTKWAEMYGPIYSIRTGATSMVVVSSNEIAKEVVVTRFPSISTRKLSYALKVLTEDKSMVAMSDYHDYHKTVKRHILTAVLGPNAQKKFRAHRDTMMENVSNELHAFFEKNPNQEVNLRKIFQSQLFGLAMKQALGKDVESIYVKDLETTMKREEIFEVLVVDPMMGAIEVDWRDFFPYLKWVPNKSFENIIHRMYTRREAVMKALIQEHKKRIASGENLNSYIDYLLSEAQTLTDKQLLMSLWEPIIESSDTTMVTTEWAMYELAKNPNMQDRLYEEIQSVCGSEKITEENLSQLPYLYAVFQETLRKHCPVPIMPLRYVHENTVLGGYHVPAGTEVAINIYGCNMDKKVWENPEEWNPERFLSEKESMDLYKTMAFGGGKRVCAGSLQAMVISCIGIGRLVQDFEWKLKDDAEEDVNTLGLTTQKLHPLLALINPRK

SEQ ID NO: 296 - DNA, 1563 bp, Artificial Sequence
  Synthetic
atggaaatgtcctcaagtgtcgcagccacaatcagtatctggatggtcgtcgtatgtatcgtaggtgtaggttggagagtcgtaaattgggtttggttgagaccaaagaaattggaaaagagattgagagaacaaggtttggccggtaattcttacagattgttgttcggtgacttgaaggaaagagctgcaatggaagaacaagcaaattcaaagcctataaacttctcccatgacatcggtccaagagttttcccttcaatgtacaagaccatccaaaactacggtaaaaactcctacatgtggttaggtccataccctagagtccacatcatggatccacaacaattgaagaccgtttttactttggtctacgacattcaaaagccaaatttgaaccctttgattaaattcttgttagatggtatcgttacacatgaaggtgaaaagtgggctaagcacagaaagattattaacccagcattccatttggaaaagttgaaggatatgatacctgctttctttcactcatgtaatgaaatcgtcaacgaatgggaaagattgatttcaaaagaaggttcctgcgaattggatgtaatgccttatttgcaaaatttggccgctgacgccatttcaagaaccgcttttggttcttcatacgaagaaggtaaaatgatcttccaattgttgaaggaattgactgatttggttgtcaaggtagcttttggtgtttatattccaggttggagattcttgcctacaaagagtaacaacaaaatgaaggaaattaatagaaaaatcaagtctttgttgttgggtatcattaacaagagacaaaaggcaatggaagaaggtgaagccggtcaatctgatttgttgggtatattaatggaaagtaattctaacgaaatccaaggtgaaggtaataacaaggaagatggcatgtctattgaagacgtcatcgaagagtgtaaggtattttatataggtggtcaagaaactacagcaagattattgatctggactatgatattgttgtccagtcatacagaatggcaagaaagagccagaaccgaagtcttgaaggtatttggtaataagaaaccagatttcgacggtttgtcaagattgaaggtagttactatgatcttgaacgaagttttaagattgtacccacctgcttccatgttgacaagaatcatccaaaaggaaacaagagttggtaaattaaccttgccagcaggtgttatcttgataatgcctatcatcttgatacatagagatcacgacttgtggggtgaagatgctaacgagtttaaaccagaaagattcagtaaaggtgtttctaaggcagccaaagtccaaccagcctttttcccttttggttggggtcctagaatttgcatgggtcaaaacttcgctatgatcgaagctaagatggcattgagtttgatcttgcaaagattttctttcgaattgtcttcatcctacgttcatgcaccaactgtcgtcttcactacacaaccacaacacggtgcccacatcgttttgagaaagttatga

SEQ ID NO: 297 - DNA, 2079 bp, Artificial Sequence
  Synthetic
atgacctctgcattgtatgcttctgatcttttcaaacaattaaagagtataatgggtactgactccttgtctgatgatgtagttttggtaatagctactacatctttagctctagtcgctggttttgtggtcttgctttggaagaagactactgctgatagatccggtgaattgaaacctctgatgattcctaaatctttgatggctaaagatgaagacgatgatttggacctgggctctggtaagacaagagtttctattttttttggtactcaaactggtactgccgagggttttgctaaggctttgtctgaggaaattaaagctagatatgaaaaggccgcagttaaggtgattgatttggatgactatgctgctgatgatgatcaatacgaagaaaaattgaagaaagaaactttggcattcttctgtgtggctacttacggtgatggtgaaccaactgacaacgctgctagattttataaatggttcactgaggaaaatgaaagagatattaagttacaacaattggcttatggtgtttttgccctaggaaatagacaatacgagcattttaataaaatcggtatcgttttggacgaggaactatgtaagaaaggtgctaaaagattaattgaagttggtttaggtgatgacgatcaatcaattgaagatgactttaacgcttggaaagagtctttgtggtctgagttggataaactgttgaaggatgaagatgacaaatcagtagcaacaccatatactgctgttataccagaatatagagttgttactcatgatccaagatttactactcagaaatctatggagtctaatgttgctaacggtaatactactattgatattcatcatccatgcagagtagacgttgccgttcaaaaagaattgcatacccatgagtccgatagatcttgtatccatcttgagttcgatatttctaggactggtattacctatgaaactggtgaccatgtgggtgtttatgcagaaaatcatgtcgaaatagttgaagaagctggtaagttgttgggtcattccttggacctggtcttttctatccatgctgacaaagaagatggaagtccattggaatctgctgtccctccaccatttccaggaccatgcactttgggtactggtttggctagatatgcagacttgttgaatccaccaagaaaatcagcattggttgctctggctgcttatgcaaccgagcctagtgaagctgaaaaattgaagcatcttacttctccagatggtaaagatgaatactctcaatggattgttgcttctcaaagaagtttattagaagtaatggcagcatttccatctgctaaaccaccattaggtgttttctttgctgctatcgctccaagattacagccaagatattattcaatatcttcttcaccaagattggctccatctagggttcatgtcacttctgctctagtttacggtccaacaccaactggtagaatccataagggtgtttgttccacttggatgaagaatgctgttccagcagagaaatctcatgaatgctctggtgctccaatttttataagagcttctaactttaaattaccatctaatccatctactccaatagtaatggtaggaccaggtactggtttagcaccatttagaggtttccttcaagaaagaatggctttaaaagaggacggtgaagaactgggttcttctctgttattctttggttgtagaaatagacaaatggactttatttacgaagatgaattgaataattttgttgatcagggagtaatttccgagttgataatggctttttctagggaaggtgctcaaaaagagtacgtccaacataaaatgatggaaaaagctgctcaggtatgggatttaattaaagaagaaggttatttgtatgtatgcggtgacgctaaaggtatggcaagagacgtacatagaactttgcatactatagtgcaagaacaagaaggtgtgtcttctagtgaagctgaggccattgttaagaaactacaaactgaaggtagatatctgagagacgtatggtaa

SEQ ID NO: 298 - DNA, 2106 bp, Artificial Sequence; identical to SEQ ID NO: 266
  Synthetic

SEQ ID NO: 299 - DNA, 2280 bp, Artificial Sequence
  Synthetic
atgtggaggcttaaagtaggcgcggaatcagtcggggagaatgacgaaaagtggctgaaaagcattagtaaccacttgggtcgccaggtgtgggaattttgcccagatgcaggtacgcaacaacaactattacaggttcataaggctagaaaagccttccatgatgaccgttttcacagaaagcaatcgtccgatttgttcatcaccatacaatatggaaaagaggttgaaaatggaggtaagacagctggcgtaaaactcaaggagggtgaagaagttagaaaggaggcagtcgaatcttctttggaacgggctttatcgttttactcttcaattcaaacttccgatggtaactgggccagtgacctgggtggtccgatgtttttactacccggcttggttatcgccctttatgtaaccggcgtcctgaatagcgtgctatccaaacatcataggcaggaaatgtgtcgatacgtttataaccaccaaaatgaggatgggggttggggattacatattgaaggaccttcaacaatgttcgggtctgcacttaattatgtcgctttgagactcttaggcgaagacgcaaacgctggtgccatgccaaaagcaagagcgtggatattggatcacggaggtgcgactggtatcacgtcatggggcaaactttggctctcggttttaggagtgtacgagtggagtggcaataatcctctaccacctgaattttggctgtttccttatttcttgccgttccatcccgggcgaatgtggtgtcattgcagaatggtatatttaccaatgagttacctctatggtaagcgttttgtaggtccaattactcctatagttttgtctttacgcaaagaactatacgctgtcccataccatgagatcgattggaacaagtcgcgtaatacatgtgctaaagaagatctttattacccccacccgaaaatgcaggacattctgtgggggtcattgcatcacgtttatgagcccttatttaccagatggccggcgaaaagactaagggaaaaggctttgcaaactgccatgcaacatatacactacgaagatgaaaacacaagatacatttgtttagggcctgtaaataaagtgttgaatttactttgctgttgggtagaagacccatatagcgatgcatttaagctccatttgcagagggttcacgactatttatgggtcgctgaagatggaatgaaaatgcaaggttataatggatctcaattgtgggacacagcatttagcattcaggccattgtctctactaaactcgttgataactacggcccaacgctacggaaggcccatgatttcgtgaaaagcagtcagatacaacaagattgccctggcgatccaaacgtgtggtataggcatatacacaagggtgcttggccattctcaacaagagatcatggttggctgatctccgattgtacagctgagggattaaaggcggcattaatgttgtctaaattaccgagtgaaaccgttggtgagagcttggaaagaaatagactgtgtgatgccgtgaatgtgttgctttccctgcaaaatgacaatggaggtttcgcgtcgtatgaactaactcgatcttatccttggttagaacttatcaaccccgcagaaacctttggggatattgttatcgattatccatacgtggagtgtacttcagcaaccatggaggctttgacactgtttaaaaaacttcatcctggacatcgtactaaggaaattgatacggccatagtacgcgcagctaactttctagaaaatatgcaaagaactgatggtagttggtacggttgctggggcgtttgtttcacttacgctggctggtttggaattaaaggtctagtagctgccggacgtacatataacaattgcttggccattagaaaggcttgtgactttctcttatcaaaagaactacctggtggtgggtggggagagtcttatcttagctgccagaacaaagtatatactaatttggaaggcaacaggccacaccttgttaacacagcatgggtattgatggctctgattgaagctggtcaagctgaacgtgacccaacgcccttacacagagcagcaagactgctgatcaattcacagttagaaaatggtgatttccctcagcaagagatcatgggcgtttttaacaagaattgtatgattacttacgccgcatatcgtaacatatttccgatttgggcattaggggaatactgccatagggtgcttactgaataa

SEQ ID NO: 300 - DNA, 951 bp, Artificial Sequence
  Synthetic
atggatcagatcgagcacattactataaataccaacggcattaaaatgcatatagcgtcagtagggacaggaccagttgtcctgcttctacatggtttccccgaattgtggtactcttggcgtcaccaattgttatatttatcgagtgtgggttatagggcaatcgcccctgacctgagaggttacggcgatacggattccccggcatctccaactagctatacagctctccatattgttggagacttggtgggtgctttagatgaactaggaattgaaaaggtttttctagtcggtcatgactggggcgccataatcgcttggtatttttgccttttccgccctgatcgaattaaagctttggtaaatttatcagttcaatttataccgagaaacccagcaattcctttcatcgaaggttttcgtaccgcgtttggcgacgatttttacatgtgtagattccaggtcccaggagaggcagaggaagattttgcctctatagacactgctcaacttttcaagaccagtctatgtaatagatcctcagcgcccccttgcctcccaaaagaaattgggttcagggccattcccccacctgaaaatttgcctagctggctgacggaggaagatatcaactattacgctgcaaagtttaaacaaacaggtttcactggtgccctcaattactatagagcatttgatcttacttgggaattaacagctccatggactggtgctcaaatacaggttccagtaaaatttatcgtaggagattccgatttgacgtatcattttcccggagcaaaggagtacattcacaacgggggcttcaaaaaagacgtgcctttattggaagaggttgtggtagttaaggatgcatgtcacttcatcaaccaagaaagacctcaagaaattaatgctcatattcatgactttataaataagttctaa

SEQ ID NO: 301 - DNA, 951 bp, Artificial Sequence
  Synthetic
atggagaagattgaacacacaacgatctcgaccaacggtataaatatgcatgtggcatcaattggctctggacccgccgtacttttcttgcatggttttccagaactatggtacagctggaggcaccagttactgtttttaagttccatggggtatagagcgatagctccggacttgcgcggattcggtgatactgatgctccaccttcgcctagttcatataccgcacatcatattgtcggggacttggttggcctattagatcaactcggtatcgatcaagtttttttggtcggacacgactggggtgccatgatggcgtggtacttttgtctgttccgtccagatcgagtgaaagctcttgttaatttatctgttcatttcctaagaagacacccatccattaaatttgtagatgggtttagggcacttttaggagatgacttctatttttgccaatttcaggaacctggcgtggcagaggctgattttggttccgtagacgttgccacaatgttaaagaaattcttgactatgcgggatccaagacccccaatgataccgaaggaaaaaggttttagagctttggaaacacctgatccgctccctgcgtggttaactgaagaagacatcgattacttcgccggtaaatttcgtaagacgggtttcactggaggctttaactattatcgcgctttcaatctgacatgggagctaacagcaccctggtcgggttctgaaataaaggtggcagctaaatttattgtcggagaccttgacttagtttaccattttcctggtgcgaaggagtatattcatggagggggcttcaaaaaagatgtacccttgctagaagaggtcgttgtcgtggatggcgctgcccattttataaatcaagaaagaccagcagagattagctctctaatctacgactttatcaaaaagttctaa

SEQ ID NO: 302 - DNA, 1335 bp, Artificial Sequence
  Synthetic
atgggaaagctattacaattggcattgcatccggtcgagatgaaggcagctttgaagctgaagttttgcagaacaccgctattctccatctatgatcagtccacgtctccatatctcttgcactgtttcgaactgttgaacttgacctccagatcgtttgctgctgtgatcagagagctgcatccagaattgagaaactgtgttactctcttttatttgattttaagggctttggataccatcgaagacgatatgtccatcgaacacgatttgaaaattgacttgttgcgtcacttccacgagaaattgttgttaactaaatggagtttcgacggaaatgcccccgatgtgaaggacagagccgttttgacagatttcgaatcgattcttattgaattccacaaattgaaaccagaatatcaagaagtcatcaaggagatcaccgagaaaatgggtaatggtatggccgactacatcttggatgaaaattacaacttgaatgggttgcaaaccgtccacgactacgacgtgtactgtcactacgtagctggtttggtcggtgatggtttgacccgtttgattgtcattgccaagtttgccaacgaatctttgtattctaatgagcaattgtatgaaagcatgggtcttttcctacaaaaaaccaacatcatcagagactacaatgaagatttggtcgatggtagatccttctggcccaaggaaatctggtcacaatacgctcctcagttgaaggacttcatgaaacctgaaaacgaacaactggggttggactgtataaaccacctcgtcttaaacgcattgagtcatgttatcgatgtgttgacttatttggccagtatccacgagcaatccactttccaattttgtgccattccccaagttatggccattgcaaccttggctttggtattcaacaaccgtgaagtgctacatggcaatgtaaagattcgtaagggtactacctgctatttaattttgaaatcaaggactttgcgtggctgtgtcgagatttttgactattacttacgtgatatcaaatctaaattggctgtgcaagatccaaatttcttaaaattgaacattcaaatctccaagatcgaacaattcatggaagaaatgtaccaggataaattacctcctaacgtgaagccaaatgaaactccaattttcttgaaagttaaagaaagatccagatacgatgatgaattggtcccaacccaacaagaagaagagtacaagttcaatatggttttatctatcatcttgtccgttcttcttgggttttattatatatacactttacacagagcgtga

SEQ ID NO: 303 - DNA, 1491 bp, Artificial Sequence
  Synthetic
atgtctgctgttaacgttgcacctgaattgattaatgccgacaacacaattacctacgatgcgattgtcatcggtgctggtgttatcggtccatgtgttgctactggtctagcaagaaagggtaagaaagttcttatcgtagaacgtgactgggctatgcctgatagaattgttggtgaattgatgcaaccaggtggtgttagagcattgagaagtctgggtatgattcaatctatcaacaacatcgaagcatatcctgttaccggttataccgtctttttcaacggcgaacaagttgatattccatacccttacaaggccgatatccctaaagttgaaaaattgaaggacttggtcaaagatggtaatgacaaggtcttggaagacagcactattcacatcaaggattacgaagatgatgaaagagaaaggggtgttgcttttgttcatggtagattcttgaacaacttgagaaacattactgctcaagagccaaatgttactagagtgcaaggtaactgtattgagatattgaaggatgaaaagaatgaggttgttggtgccaaggttgacattgatggccgtggcaaggtggaattcaaagcccacttgacatttatctgtgacggtatcttttcacgtttcagaaaggaattgcacccagaccatgttccaactgtcggttcttcgtttgtcggtatgtctttgttcaatgctaagaatcctgctcctatgcacggtcacgttattcttggtagtgatcatatgccaatcttggtttaccaaatcagtccagaagaaacaagaatcctttgtgcttacaactctccaaaggtcccagctgatatcaagagttggatgattaaggatgtccaacctttcattccaaagagtctacgtccttcatttgatgaagccgtcagccaaggtaaatttagagctatgccaaactcctacttgccagctagacaaaacgacgtcactggtatgtgtgttatcggtgacgctctaaatatgagacatccattgactggtggtggtatgactgtcggtttgcatgatgttgtcttgttgattaagaaaataggtgacctagacttcagcgaccgtgaaaaggttttggatgaattactagactaccatttcgaaagaaagagttacgattccgttattaacgttttgtcagtggctttgtattctttgttcgctgctgacagcgataacttgaaggcattacaaaaaggttgtttcaaatatttccaaagaggtggcgattgtgtcaacaaacccgttgaatttctgtctggtgtcttgccaaagcctttgcaattgaccagggttttcttcgctgtcgctttttacaccatttacttgaacatggaagaacgtggtttcttgggattaccaatggctttattggaaggtattatgattttgatcacagctattagagtattcaccccatttttgtttggtgagttgattggttaa

SEQ ID NO: 304 - DNA, 2196 bp, Artificial Sequence
  Synthetic
atgacagaattttattctgacacaatcggtctaccaaagacagatccacgtctttggagactgagaactgatgagctaggccgagaaagctgggaatatttaacccctcagcaagccgcaaacgacccaccatctacctttacacaatggctactgcaagatcccaaatttcctcaacctcatccagaaagaaataagcattcaccagatttttcagccttcgatgcgtgtcataatggtgcatcttttttcaaactgcttcaagagcctgactcaggtatttttccgtgtcaatataaaggacccatgttcatgacaatcggttacgtagccgtaaactatatcgccggtattgaaattcctgagcatgagagaatagaattaattagatacatcgtcaatactgctcaccctgtcgacggaggttggggtctacattctgttgacaaatccaccgtgtttggtacagtattgaactatgtaatcttacgtttattgggtctacccaaggaccacccggtttgcgccaaggcaagaagcacattgttaaggttaggcggtgctattggatcccctcactggggaaaaatttggctaagtgcactaaacttgtataaatgggaaggtgtgaaccctgcccctcctgaaacttggttacttccatattcactgcccatgcatccggggagatggtgggttcatactagaggtgtttacattccggtcagttacctgtcattggtcaaattttcttgcccaatgactcctcttcttgaagaactgaggaatgaaatttacactaaaccgtttgacaagattaacttctccaagaacaggaataccgtatgtggagtagacctatattacccccattctactactttgaatattgcgaacagccttgtagtattttacgaaaaatacctaagaaaccggttcatttactctctatccaagaagaaggtttatgatctaatcaaaacggagttacagaatactgattccttgtgtatagcacctgttaaccaggcgttttgcgcacttgtcactcttattgaagaaggggtagactcggaagcgttccagcgtctccaatataggttcaaggatgcattgttccatggtccacagggtatgaccattatgggaacaaatggtgtgcaaacctgggattgtgcgtttgccattcaatactttttcgtcgcaggcctcgcagaaagacctgaattctataacacaattgtctctgcctataaattcttgtgtcatgctcaatttgacaccgagtgcgttccaggtagttatagggataagagaaagggggcttggggcttctcaacaaaaacacagggctatacagtggcagattgcactgcagaagcaattaaagccatcatcatggtgaaaaactctcccgtctttagtgaagtacaccatatgattagcagtgaacgtttatttgaaggcattgatgtgttattgaacctacaaaacatcggatcttttgaatatggttcctttgcaacctatgaaaaaatcaaggccccactagcaatggaaaccttgaatcctgctgaagtttttggtaacataatggtagaatacccatacgtggaatgtactgattcatccgttctggggttgacatattttcacaagtacttcgactataggaaagaggaaatacgtacacgcatcagaatcgccatcgaattcataaaaaaatctcaattaccagatggaagttggtatggaagctggggtatttgttttacatatgccggtatgtttgcattggaggcattacacaccgtgggggagacctatgagaattcctcaacggtaagaaaaggttgcgacttcttggtcagtaaacagatgaaggatggcggttggggggaatcaatgaagtccagtgaattacatagttatgtggatagtgaaaaatcgctagtcgttcaaaccgcatgggcgctaattgcacttcttttcgctgaatatcctaataaagaagtcatcgaccgcggtattgaccttttaaaaaatagacaagaagaatccggggaatggaaatttgaaagtgtagaaggtgttttcaaccactcttgtgcaattgaatacccaagttatcgattcttattccctattaaggcattaggtatgtacagcagggcatatgaaacacatacgctttaa

SEQ ID NO: 305 - protein, 520 aa, Siraitia grosvenorii; identical to SEQ ID NO: 280

SEQ ID NO: 306 - protein, 692 aa, Arabidopsis thaliana [sequence omitted]

SEQ ID NO: 307 - protein, 701 aa, Siraitia grosvenorii; identical to SEQ ID NO: 282

SEQ ID NO: 308 - protein, 759 aa, Siraitia grosvenorii; identical to SEQ ID NO: 247

SEQ ID NO: 309 - protein, 316 aa, Siraitia grosvenorii; identical to SEQ ID NO: 286

SEQ ID NO: 310 - protein, 316 aa, Arabidopsis thaliana; identical to SEQ ID NO: 287

SEQ ID NO: 311 - protein, 444 aa, Saccharomyces cerevisiae
MGKLLQLALHPVEMKAALKLKFCRTPLFSIYDQSTSPYLLHCFELLNLTSRSFAAVIRELHPELRNCVTLFYLILRALDTIEDDMSIEHDLKIDLLRHFHEKLLLTKWSFDGNAPDVKDRAVLTDFESILIEFHKLKPEYQEVIKEITEKMGNGMADYILDENYNLNGLQTVHDYDVYCHYVAGLVGDGLTRLIVIAKFANESLYSNEQLYESMGLFLQKTNIIRDYNEDLVDGRSFWPKEIWSQYAPQLKDFMKPENEQLGLDCINHLVLNALSHVIDVLTYLASIHEQSTFQFCAIPQVMAIATLALVFNNREVLHGNVKIRKGTTCYLILKSRTLRGCVEIFDYYLRDIKSKLAVQDPNFLKLNIQISKIEQFMEEMYQDKLPPNVKPNETPIFLKVKERSRYDDELVPTQQEEEYKFNMVLSIILSVLLGFYYIYTLHRA

SEQ ID NO: 312 - protein, 496 aa, Saccharomyces cerevisiae
MSAVNVAPELINADNTITYDAIVIGAGVIGPCVATGLARKGKKVLIVERDWAMPDRIVGELMQPGGVRALRSLGMIQSINNIEAYPVTGYTVFFNGEQVDIPYPYKADIPKVEKLKDLVKDGNDKVLEDSTIHIKDYEDDERERGVAFVHGRFLNNLRNITAQEPNVTRVQGNCIEILKDEKNEVVGAKVDIDGRGKVEFKAHLTFICDGIFSRFRKELHPDHVPTVGSSFVGMSLFNAKNPAPMHGHVILGSDHMPILVYQISPEETRILCAYNSPKVPADIKSWMIKDVQPFIPKSLRPSFDEAVSQGKFRAMPNSYLPARQNDVTGMCVIGDALNMRHPLTGGGMTVGLHDVVLLIKKIGDLDFSDREKVLDELLDYHFERKSYDSVINVLSVALYSLFAADSDNLKALQKGCFKYFQRGGDCVNKPVEFLSGVLPKPLQLTRVFFAVAFYTIYLNMEERGFLGLPMALLEGIMILITAIRVFTPFLFGELIG

SEQ ID NO: 313 - protein, 731 aa, Saccharomyces cerevisiae
MTEFYSDTIGLPKTDPRLWRLRTDELGRESWEYLTPQQAANDPPSTFTQWLLQDPKFPQPHPERNKHSPDFSAFDACHNGASFFKLLQEPDSGIFPCQYKGPMFMTIGYVAVNYIAGIEIPEHERIELIRYIVNTAHPVDGGWGLHSVDKSTVFGTVLNYVILRLLGLPKDHPVCAKARSTLLRLGGAIGSPHWGKIWLSALNLYKWEGVNPAPPETWLLPYSLPMHPGRWWVHTRGVYIPVSYLSLVKFSCPMTPLLEELRNEIYTKPFDKINFSKNRNTVCGVDLYYPHSTTLNIANSLVVFYEKYLRNRFIYSLSKKKVYDLIKTELQNTDSLCIAPVNQAFCALVTLIEEGVDSEAFQRLQYRFKDALFHGPQGMTIMGTNGVQTWDCAFAIQYFFVAGLAERPEFYNTIVSAYKFLCHAQFDTECVPGSYRDKRKGAWGFSTKTQGYTVADCTAEAIKAIIMVKNSPVFSEVHHMISSERLFEGIDVLLNLQNIGSFEYGSFATYEKIKAPLAMETLNPAEVFGNIMVEYPYVECTDSSVLGLTYFHKYFDYRKEEIRTRIRIAIEFIKKSQLPDGSWYGSWGICFTYAGMFALEALHTVGETYENSSTVRKGCDFLVSKQMKDGGWGESMKSSELHSYVDSEKSLVVQTAWALIALLFAEYPNKEVIDRGIDLLKNRQEESGEWKFESVEGVFNHSCAIEYPSYRFLFPIKALGMYSRAYETHTL

SEQ ID NO: 314 - DNA, 1347 bp, Artificial Sequence
  Synthetic
atggatatcgaaaaaggtaggatatcgattgtaatgttgccattcctggcccacggacatattagccccttttttgagttagctaagcatctctccaaacgtaattgtaacatcttcctttgctctacccctataaatctatcaagtattaagaaccgagtctctgacaaagattcaagtgcatccatcaagttagtggaattgcatttgccatctagcccggacttacctccacactaccacacgacaaatggccttccgagtcatttaatggttcctctacgcaatgcgtttgagactgctgcacctactttctcagaaatacttaaaacattgaacccagatttattgatttatgattttaatcccagttgggccccggaaatcgcttcttcccataatattccagcagtatattttctgacatctgccgctgcaacctcgtcaatggggttgcacgcgtttaaaaactccggtgaaaagtacccattccctgacttctatgataatagcaatataactccagaacccccatcggcagataagatgaaactatttcatgattttgttgcttgtttcaaacggagttgcgatattatcttaataaaatcatttagagaactcgagggtaaatacattgacttcttgtctacactatcgaagaagactttggttcccgtgggacctttagtccaggaccctatgggtcacgacgaagatccaaaaactggccatttaattaactggctcgataagagagccgagtcaacggttgtgtttgtttgttttgggagtgagtattttcctagtaatgaagaactggaagagttagctattggtttggaaatctctatggtttctttcattctcgcggtaagattcccagaaggagagaagaaaggcattttaccagaaggttttgttcaaagggtcggcgaccgaggtctggtcgtagaggggtgggctcctcaagccagaatattaggtcattcttccaccggtggatttgtgtcccattgcggttggtcttcgattatggaatcagttaaatttggggtcccggtgatcgctatggcacgtcacttagatcaaccacttaacgctaaactagccgcagaagtaggagtcggtatggaagttatgagagatgaaaacggcaagtataaaagggaagccatagcagaagtaattaggaaagtcgtgatggagaaaaatggtgaagttatgagaagaaaggcaagagaactgagtgagaagatgaaagttaagggagagcaggagataggccgcgcagtagaagagctggtccaaatctgtaagaaaaagaagcagcatgcacaatactaa

SEQ ID NO: 315 - DNA, 1488 bp, Artificial Sequence
  Synthetic
atggccttcgagaaaaacaacgaaccatttccactacattttgtcttgttccctttcatggctcagggtcatatgataccaatggttgatatcgctagattgctggctcagagaggtgttcttataacaatcgttacaaccccacataacgctgctagattcaaaaatgtcttgaatagagcaattgaatctggtttgccaattaacttggtccaagtcaagttcccataccaagaagccggtctgcaagagggacaagagaacatggatttgttgactactatggaacaaattacttcattttttaaggctgtgaacctgttaaaggaaccagtccaaaatttaatagaagaaatgtctccaagaccatcatgccttatatctgatatgtgtttgtcttacacttctgagatcgctaagaagttcaaaatcccaaagatattgttccatggtatgggttgtttctgcttattatgcgtgaatgttttgagaaaaaacagagaaatattagacaacttgaagtctgataaggaatatttcatcgtaccatatttcccagatagagtggaatttactagaccacaagttccagtcgagacttacgtcccagctggttggaaagaaatcttggaagacatggttgaagcagataagacatcatacggtgtaattgtaaactctttccaagaattggaaccagcttacgctaaagacttcaaagaagctagatcaggaaaggcatggactatcggtccagtgtccttatgtaataaggttggtgttgacaaggctgaaagaggtaataaatcagacattgatcaagatgaatgtttggagtggttggattcaaaagagccaggttcagtattatatgtgtgtttgggttctatctgtaaccttcctttatctcaattgttggagctaggtcttggtttagaggaatctcaaagaccatttatttgggtcattagaggttgggaaaaatacaaagagctggtcgaatggttttctgagagtggttttgaagacagaatccaagatagaggtttattaattaagggttggtcccctcaaatgttaattctttctcatccatctgtaggtggtttcttaactcattgcggttggaatagtactttagagggtatcactgctggtttacctatgttaacctggccattatttgctgatcaattttgtaatgagaaattagttgtacaaatactaaaagtaggtgtatctgctgaagtaaaagaggtgatgaaatggggtgaagaagaaaaaattggtgtgctagttgataaagagggcgtcaagaaggccgtcgaggagttgatgggtgaatccgatgatgccaaggaacgccgccgcagagctaaagaattgggtgagtctgctcataaggctgtagaagaaggtggttcttctcattcaaatattacattcctgttgcaagatataatgcaattggcacaatctaataactaa

SEQ ID NO: 316 - DNA, 1425 bp, Artificial Sequence
  Synthetic
atggttcagcccagagtcttattgttcccgtttccagccctgggtcacgtgaaacctttcctctcattggcagaattgttatcggatgctggcattgacgtagtttttctttccacggagtacaatcatcgtagaatcagtaacaccgaagctctagctagcagattcccaacattacacttcgaaactatacctgacgggttgccaccaaacgaatctagggctttagccgatggtccattgtatttttctatgagagaaggtactaagccacggtttcgtcaattgattcaatccctaaatgatggaagatggccaatcacctgcattatcactgacattatgttgtcttctccgatcgaggtcgctgaagagttcggtattcccgttattgcattctgtccttgttccgctcgctacctttctatacatttctttattccaaagttggtcgaagaaggtcaaatcccatacgctgatgacgatccaatcggtgaaattcaaggtgttcctctattcgaaggtttattgagaagaaaccacttgccaggttcatggtccgacaaaagcgccgatatctcatttagtcatggcctgataaaccaaaccttagctgcgggtagagccagtgctttgattttaaatacttttgacgaattggaagcgccattcttgacacacttgtctagcattttcaacaagatctataccattggtccattacacgctttgtcgaagtccagactgggcgattcttctagttctgcatccgctttgtctggtttctggaaagaagaccgtgcctgtatgtcgtggcttgactgtcaaccaccaaggtctgttgtattcgtttcttttggttccacgatgaagatgaaggccgacgaactcagagaattttggtatgggctagtctcgagtggtaaaccttttttgtgtgtcctcagatccgatgttgtctctggaggtgaagctgctgaactgattgagcagatggctgaagaggaaggtgccggtggtaagttgggtatggttgtcgagtgggctgcacaagaaaaggttttgtcacaccccgcagttggtggattcttgactcattgcggttggaatagtactgtcgaatccatcgctgctggtgttccaatgatgtgttggcctatattaggagatcaaccatccaacgctacctggatcgatagagtttggaagatcggtgtggaaagaaataacagagaatgggatagacttactgttgagaaaatggtgcgagcgttgatggaaggtcaaaagagagtagaaattcaacgatcaatggaaaagttgtctaagttggccaatgaaaaagttgtgagaggtgggctatcatttgacaacttagaagtcttagttgaagatattaagaagttgaaaccctacaagttctaa

SEQ ID NO: 317 - DNA, 1410 bp, Artificial Sequence
  Synthetic
atggaacaagcacacgacttgcttcatgtcttattgtttccatatcctgccaaaggccacataaagccattcctgtgcctagctgagttgttatgtaacgctggattgaatgtaactttcttgaacacagattacaatcatcggcgtcttcacaacttgcacttattggctgcctgttttccctccctacatttcgaaagcatttcagatggtttacagccagaccaaccacgcgacatcttggatcctaagttctacatctctatttgtcaagtgaccaaaccattgtttagagaactgttgctatcgtataagagaacgagttctgttcaaaccgggaggccgccaattacttgtgtcatcactgatgttatcttcagatttccaattgacgttgctgaagaactggacataccagtcttctccttctgcactttttctgcaagattcatgtttctttacttttggattcctaagttgatcgaagatggtcaactaccatacccgaacggtaatattaaccagaaattgtatggtgttgctccagaagccgagggtttgttgagatgtaaggatttacctggtcactgggctttcgctgacgaattaaaggatgaccaactgaacttcgtagatcaaaccacagcgagcctcagatcttccggtttgattcttaacaccttcgacgacctagaggctccctttctaggtagattgtctactatctttaagaagatttacgcggttgggccaatccatgctttattgaatagtcaccattgtggtttgtggaaagaagatcactcatgtttggcctggttggattcacgtgctgcaagatccgtcgttttcgtgagcttcggctctctcgttaagattacatcaagacaattaatggaattttggcatggtttgttaaattccggtacttcttttctattcgtcttgcgttcggacgtggttgaaggtgatggggaaaagcaagttgtcaaagaaatctacgaaaccaaggctgagggtaaatggcttgttgtcggttgggctcctcaagaaaaggtcttggctcatgaagctgttggtggcttcttgacgcactctggttggaactccatattggaatctatagccgcaggagtaccaatgatctcgtgcccaaagatcggtgaccagagttctaactgtacttggattagtaaggtttggaagattggtctggagatggaagatcaatacgatagagcgaccgttgaagctatggtgagatccatcatgaagcatgaaggtgaaaaaatccaaaagactattgccgaactcgctaaaagggctaagtacaaagtctctaaggacggtacgtcttataggaatttagagattttgatcgaagatattaagaagattaaaccgaattaa

SEQ ID NO: 318 - DNA, 1488 bp, Artificial Sequence
  Synthetic
atggtatcagaaactactaaatcttctccattgcattttgtattgttcccatttatggcccaaggtcatatgatcccaatggttgacatcgctagattattggctcaaagaggtgtcatcatcacaatagtcacaactccacataacgctgctagatttaagaatgtgttgaacagagcaattgaatcaggtttgccaatcaatttggtacaagtgaaattcccatatcttgaagcaggtttgcaagagggtcaagaaaacatcgattctttagatacaatggaaagaatgatcccattttttaaagctgtaaacttcttggaagaaccagtacagaaattgattgaggaaatgaatccaagaccatcatgcttgatttccgatttctgtcttccatatacttccaagattgccaaaaagtttaatatcccaaaaatcttattccatggtatgggttgtttttgccttctgtgtatgcatgtcttgagaaaaaatagagaaatactagataatttgaaatctgataaggaattattcactgttccagattttccagatagagttgaatttacaagaacacaagtaccagttgaaacttacgtgccagctggtgattggaaagatatatttgacggtatggtggaagctaacgaaacttcctatggagttattgtaaattcttttcaagaattggaacctgcttatgccaaagattataaggaagtcagaagtggtaaggcctggactattggtccagtatctttatgcaataaagttggtgcagataaggcagaaagaggtaacaaatctgacatagaccaagatgaatgtttaaaatggttggattccaagaaacatggtagtgtgttgtatgtctgccttggttcaatctgcaacttgccattgtcacaattaaaggaattgggtctaggtttggaagaatcacaaagaccattcatttgggtaattagaggttgggaaaaatataaagaattggtggaatggttttcagagtctggatttgaagacagaatacaagacagaggattattaatcaaaggttggtcccctcaaatgttaatattgtctcatcctagtgtcggtggttttttgacccattgtggttggaactctacattagaaggtataactgctggtttgccacttctaacttggccattgtttgctgatcagttctgcaacgaaaaattggttgttgaagtcctaaaagccggtgttagatctggtgtggaacaaccaatgaagtggggtgaagaagaaaagattggtgtgttggtggataaggaaggtgttaagaaggccgttgaggaattgatgggtgaatccgatgacgccaaggagcgccgccgcagagcaaaagaattaggtgatagtgcccataaagctgttgaagaaggtggatcttctcattctaacatatcttttttgttacaagacattatggagttagctgaaccaaacaactaa

SEQ ID NO: 319 - protein, 448 aa, Panax ginseng
MDIEKGRISIVMLPFLAHGHISPFFELAKHLSKRNCNIFLCSTPINLSSIKNRVSDKDSSASIKLVELHLPSSPDLPPHYHTTNGLPSHLMVPLRNAFETAAPTFSEILKTLNPDLLIYDFNPSWAPEIASSHNIPAVYFLTSAAATSSMGLHAFKNSGEKYPFPDFYDNSNITPEPPSADKMKLFHDFVACFKRSCDIILIKSFRELEGKYIDFLSTLSKKTLVPVGPLVQDPMGHDEDPKTGHLINWLDKRAESTVVFVCFGSEYFPSNEELEELAIGLEISMVSFILAVRFPEGEKKGILPEGFVQRVGDRGLVVEGWAPQARILGHSSTGGFVSHCGWSSIMESVKFGVPVIAMARHLDQPLNAKLAAEVGVGMEVMRDENGKYKREAIAEVIRKVVMEKNGEVMRRKARELSEKMKVKGEQEIGRAVEELVQICKKKKQHAQY

SEQ ID NO: 320 - protein, 495 aa, Arabidopsis thaliana
MAFEKNNEPFPLHFVLFPFMAQGHMIPMVDIARLLAQRGVLITIVTTPHNAARFKNVLNRAIESGLPINLVQVKFPYQEAGLQEGQENMDLLTTMEQITSFFKAVNLLKEPVQNLIEEMSPRPSCLISDMCLSYTSEIAKKFKIPKILFHGMGCFCLLCVNVLRKNREILDNLKSDKEYFIVPYFPDRVEFTRPQVPVETYVPAGWKEILEDMVEADKTSYGVIVNSFQELEPAYAKDFKEARSGKAWTIGPVSLCNKVGVDKAERGNKSDIDQDECLEWLDSKEPGSVLYVCLGSICNLPLSQLLELGLGLEESQRPFIWVIRGWEKYKELVEWFSESGFEDRIQDRGLLIKGWSPQMLILSHPSVGGFLTHCGWNSTLEGITAGLPMLTWPLFADQFCNEKLVVQILKVGVSAEVKEVMKWGEEEKIGVLVDKEGVKKAVEELMGESDDAKERRRRAKELGESAHKAVEEGGSSHSNITFLLQDIMQLAQSNN

SEQ ID NO: 321 - protein, 474 aa, Siraitia grosvenorii
MVQPRVLLFPFPALGHVKPFLSLAELLSDAGIDVVFLSTEYNHRRISNTEALASRFPTLHFETIPDGLPPNESRALADGPLYFSMREGTKPRFRQLIQSLNDGRWPITCIITDIMLSSPIEVAEEFGIPVIAFCPCSARYLSIHFFIPKLVEEGQIPYADDDPIGEIQGVPLFEGLLRRNHLPGSWSDKSADISFSHGLINQTLAAGRASALILNTFDELEAPFLTHLSSIFNKIYTIGPLHALSKSRLGDSSSSASALSGFWKEDRACMSWLDCQPPRSVVFVSFGSTMKMKADELREFWYGLVSSGKPFLCVLRSDVVSGGEAAELIEQMAEEEGAGGKLGMVVEWAAQEKVLSHPAVGGFLTHCGWNSTVESIAAGVPMMCWPILGDQPSNATWIDRVWKIGVERNNREWDRLTVEKMVRALMEGQKRVEIQRSMEKLSKLANEKVVRGGLSFDNLEVLVEDIKKLKPYKF

SEQ ID NO: 322 - protein, 469 aa, Siraitia grosvenorii
MEQAHDLLHVLLFPYPAKGHIKPFLCLAELLCNAGLNVTFLNTDYNHRRLHNLHLLAACFPSLHFESISDGLQPDQPRDILDPKFYISICQVTKPLFRELLLSYKRTSSVQTGRPPITCVITDVIFRFPIDVAEELDIPVFSFCTFSARFMFLYFWIPKLIEDGQLPYPNGNINQKLYGVAPEAEGLLRCKDLPGHWAFADELKDDQLNFVDQTTASLRSSGLILNTFDDLEAPFLGRLSTIFKKIYAVGPIHALLNSHHCGLWKEDHSCLAWLDSRAARSVVFVSFGSLVKITSRQLMEFWHGLLNSGTSFLFVLRSDVVEGDGEKQVVKEIYETKAEGKWLVVGWAPQEKVLAHEAVGGFLTHSGWNSILESIAAGVPMISCPKIGDQSSNCTWISKVWKIGLEMEDQYDRATVEAMVRSIMKHEGEKIQKTIAELAKRAKYKVSKDGTSYRNLEILIEDIKKIKPN

SEQ ID NO: 323 - protein, 495 aa, Arabidopsis thaliana
MVSETTKSSPLHFVLFPFMAQGHMIPMVDIARLLAQRGVIITIVTTPHNAARFKNVLNRAIESGLPINLVQVKFPYLEAGLQEGQENIDSLDTMERMIPFFKAVNFLEEPVQKLIEEMNPRPSCLISDFCLPYTSKIAKKFNIPKILFHGMGCFCLLCMHVLRKNREILDNLKSDKELFTVPDFPDRVEFTRTQVPVETYVPAGDWKDIFDGMVEANETSYGVIVNSFQELEPAYAKDYKEVRSGKAWTIGPVSLCNKVGADKAERGNKSDIDQDECLKWLDSKKHGSVLYVCLGSICNLPLSQLKELGLGLEESQRPFIWVIRGWEKYKELVEWFSESGFEDRIQDRGLLIKGWSPQMLILSHPSVGGFLTHCGWNSTLEGITAGLPLLTWPLFADQFCNEKLVVEVLKAGVRSGVEQPMKWGEEEKIGVLVDKEGVKKAVEELMGESDDAKERRRRAKELGDSAHKAVEEGGSSHSNISFLLQDIMELAEPNN
